(19) United States
(12) Patent Application Publication
(10) Pub. No.: US 2024/0124851 A1
(43) Pub. Date: Apr. 18, 2024

(54) ESCHERICHIA COLI BACTERIOPHAGES AND USES THEREOF

(71) Applicant: Intralytix, Inc., Columbia, MD (US)

(72) Inventor: Alexander SULAKVELIDZE, Brookeville, MD (US)

(21) Appl. No.: 18/471,419

(22) Filed: Sep. 21, 2023

Related U.S. Application Data
(60) Provisional application No. 63/376,496, filed on Sep. 21, 2022.

(51) Int. Cl. C12N 7/00; A23L 3/3571; A61K 35/76; A61P 31/04

(52) U.S. Cl. CPC C12N 7/00; A23L 3/3571; A61K 35/76; A61P 31/04

(57) ABSTRACT

The present invention is directed to isolated bacteriophages having specificity and lytic activity against strains of pathogenic E. coli, methods of using the bacteriophages, progeny and derivatives derived therefrom, to control the growth of pathogenic E. coli in various settings (e.g., food safety, environmental—including food establishments and medical settings—sanitation, urinary tract infections, modulating microbiome, prebiotics, probiotics).

### CROSS-REFERENCE TO RELATED APPLICATIONS

[0001] The present application claims the benefit of U.S. Provisional Patent Application No. 63/376,496, filed Sep. 21, 2021, the disclosure of which is incorporated by reference in its entirety herein.

### INCORPORATION OF SEQUENCE LISTING

[0002] The sequence listing that is contained in the file named “041071_00115_Sequence_Listing.xml,” which is 1,124 kilobytes as measured in Windows 10 operating system and was created on Sep. 12, 2023, is filed electronically herewith and incorporated herein by reference.

### FIELD OF THE INVENTION

[0003] The present invention relates to eight novel bacteriophages designated (the “Deposited Bacteriophages”), and compositions and preparations corresponding thereto which possess lytic activity against strains of Escherichia coli capable of causing animal (including human) disease, including Shiga-toxin producing E. coli (STEC, also sometimes referred to as verocytotoxin-producing E. coli or VTEC), Enterohemorrhagic E. coli (EHEC), enteropathogenic E. coli (EPEC), enterotoxigenic E. coli (ETEC), enteroaggregative E. coli (EAEC), enteroinvasive E. coli (EIEC), diffusely adherent E. coli (DAEC), uropathogenic E. coli (UPEC), meningitis-associated E. coli (MNEC) (including neonatal meningitis-causing E. coli or NMEC), avian pathogenic E. coli (APEC), sepsis-associated E. coli (SAEC), mammary pathogenic E. coli, endometrial pathogenic E. coli, adherent invasive E. coli (AIEC), and necrotoxigenic E. coli (the “Targeted Bacteria” or “Pathogenic E. coli”).

### BACKGROUND OF THE INVENTION

### Bacteriophages

[0004] Bacteriophages are bacterial viruses that attach to their specific hosts and kill them by internal replication and bacterial lysis involving a complex lytic cycle involving several structural and regulatory genes. Phages are very specific in that they only attack their targeted bacterial hosts. They cannot infect human or other eukaryotic cells. Bacteriophages were first identified, in the early part of the 20th century, by Felix D'Herelle who called them bacteriophages or bacteria-eaters (from the Greek phago meaning to eat or devour) (Summers 1999)¹. It is estimated that there are approximately 10³¹ phage particles in the biosphere, and about 10²³ phage infections occur every second on a global scale (Suttle 2005), (Suttle 2007). ¹Full bibliographic citations are included at the end of the specification.

### Bacteriophage Structure

[0005] Although different bacteriophages may contain different materials, they all contain nucleic acid and protein. Depending upon the phage, the nucleic acid can be either DNA or RNA, and it can exist in various forms. The nucleic acids of phages often contain unusual or modified bases. These modified bases protect phage nucleic acid from nucleases that break down host nucleic acids during phage infection. The size of the nucleic acid varies depending upon the phage. The simplest phages only have enough nucleic acid to code for 3-5 average size gene products while the more complex phages may code for over 100 gene products (the largest bacteriophage genomes maybe >700 kb in size). The number of different kinds of protein and the amount of each kind of protein in the phage particle will vary depending upon the phage. The simplest phage has many copies of only one or two different proteins while more complex phages may have many different kinds. The proteins function in infection and to protect the nucleic acid from nucleases in the environment (McGrath and van Sinderen 2007).

[0006] The basic structural features of bacteriophages include their head or capsid, and tail. For example, T4, a common phage is among the largest phages; it is approximately 200 nm long and 80-100 nm wide. Most phages range in size from 24-200 nm in length.

[0007] All phages contain a head structure which can vary in size and shape. Some are icosahedral (20 sides) others are filamentous. The head or capsid is composed of many copies of one or more different proteins. Inside the head is found the nucleic acid. The head acts as the protective covering for the nucleic acid. Many but not all phages have tails attached to the phage head. The tail is a hollow tube through which the nucleic acid passes during infection. The size of the tail can vary, and some phages do not even have a tail structure. In the more complex phages like T4 the tail is surrounded by a contractile sheath which contracts during infection of the bacterium. At the end of the tail, the more complex phages like T4 have a base plate and one or more tail fibers attached to it. The base plate and tail fibers are involved in the binding of the phage to the bacterial cell. Not all phages have base plates and tail fibers. In these instances, other structures are involved in binding of the phage particle to the bacterium (Kutter and Sulakvelidze 2005).

### Bacteriophages Infect Bacteria

[0008] Replication cycle of a lytic bacteriophage is described in detail in Sulakvelidze 2011, especially in FIG. 1 incorporated herein by reference. The first step in the lytic cycle process is the adsorption of the phage to the bacterial cell. This step is mediated by the tail fibers or by some analogous structure on those phages that lack tail fibers, and it is reversible. The tail fibers attach to specific receptors on the bacterial cell, and the host specificity of the phage (i.e., the bacteria that it can infect) is usually determined by the type of tail fibers that a phage has. The nature of the bacterial receptor varies for different bacteria (e.g., proteins on the outer surface of the bacterium, LPS, pili, and lipoprotein). These receptors are on the bacteria for other purposes, and phage have evolved to use these receptors for infection (Kutter and Sulakvelidze 2005). The attachment of the phage to the bacterium via the tail fibers is a weak one and is reversible. Irreversible binding of phage to a bacterium is mediated by one or more of the components of the base plate. Phages lacking base plates have other ways of becoming tightly bound to the bacterial cell. The irreversible binding of the phage to the bacterium results in the contraction of the sheath (for those phages which have a sheath), and the hollow tail fiber is pushed through the bacterial envelope. Phages that do not have contractile sheaths use other mechanisms to get the phage particle through the bacterial envelope. Some phages have enzymes that digest various components of the bacterial envelope (McGrath and van Sinderen 2007).

### Lytic (Virulent) Phage Life Cycle

[0009] Lytic or virulent phages are phages which can only multiply on bacteria and kill the cell by lysis at the end of the life cycle. During the eclipse phase, no infectious phage particles can be found either inside or outside the bacterial cell. The phage nucleic acid takes over the host biosynthetic machinery, and phage specified mRNAs and proteins are made. There is an orderly expression of phage directed macromolecular synthesis, just as one sees in animal virus infections. Early mRNAs code for early proteins that are needed for phage DNA synthesis and for shutting off host DNA, RNA, and protein biosynthesis. After phage DNA is made, late mRNAs and late proteins are made. The late proteins are the structural proteins that comprise the phage as well as the proteins needed for lysis of the bacterial cell (McGrath and van Sinderen 2007). In the Intracellular Accumulation Phase, the nucleic acid and structural proteins that have been made are assembled and infectious phage particles accumulate within the cell. During the Lysis and Release Phase, the bacteria begin to lyse due to the accumulation of the phage lysis protein (e.g., lysin), and intracellular phage are released. The number of particles released per infected bacteria is typically 10-250 but may be as high as 1,000.

[0010] A common assay for lytic phage is the plaque assay where lytic phages are enumerated by a plaque assay. A plaque is a clear area which results from the lysis of bacteria. Each plaque arises from a single infectious phage. The infectious particle that gives rise to a plaque is called a PFU (plaque forming unit) (Adams 1959), (Kutter and Sulakvelidze 2005).

### Temperate (“Lysogenic”) Phage Life Cycle

[0011] Temperate phages (sometimes also mistakenly called “lysogenic” phages) are those that can either multiply via the lytic cycle or enter a quiescent state in the cell. In this quiescent state most of the phage genes are not transcribed; the phage genome exists in a repressed state. The phage DNA in this repressed state is called a prophage because it is not a phage per se, but it has the potential to produce phage. In most cases the phage DNA integrates into the host chromosome and is replicated along with the host chromosome and passed on to the daughter cells. The cell harboring a prophage is not adversely affected by the presence of the prophage, and the lysogenic state may persist indefinitely. The cell harboring a prophage is termed a lysogen. See (McGrath and van Sinderen 2007), herein incorporated by reference in its entirety.

[0012] Anytime a lysogenic bacterium is exposed to adverse conditions, the lysogenic state can be terminated. This process is called induction. Adverse conditions which favor the termination of the lysogenic state include desiccation, exposure to UV or ionizing radiation, and exposure to mutagenic chemicals. This leads to the expression of the phage genes, reversal of the integration process, and lytic multiplication. See (Kutter and Sulakvelidze 2005), herein incorporated by reference in its entirety.

### Lytic and Lysogenic Bacteriophages

[0013] Bacteriophages have a lytic cycle or a lysogenic cycle, but some bacteriophages can carry out both. Differences in the replication cycles of lytic and temperate phages are schematically described in detail in Sulakvelidze 2011, especially in FIG. 2 incorporated herein by reference. With lytic phages such as the T4 phage, bacterial cells are broken open (lysed) and destroyed after immediate replication of the virion. As soon as the cell is destroyed, the new bacteriophage viruses can find new hosts (Kutter and Sulakvelidze 2005). In contrast, the lysogenic cycle does not result in immediate lysing of the host cell. Those phages able to undergo lysogeny are known as temperate phages. Their genome will integrate with host DNA and replicate along with it harmlessly or may even become established as a plasmid or prophage. The virus remains dormant until host conditions are stressed or deteriorate (e.g., due to depletion of nutrients, or exposure to UV light) then the endogenous phages (known as prophages) become active. At this point they initiate the reproductive cycle resulting in lysis of the host cell. As the lysogenic cycle allows the host cell to continue to survive and reproduce, the virus is reproduced in the host cell's offspring. See (Kutter and Sulakvelidze 2005).

E. coli Bacteria

[0014] Escherichia coli (E. coli) is a Gram-negative, facultative anaerobic, rod-shaped, coliform bacterium of the genus Escherichia (named after its discoverer Theodor Escherich), family Enterobacteriaceae, order Enterobacteriales, class Gammaproteobacteria, phylum Proteobacteria. Many E. coli strains are normal commensal of a healthy human gastrointestinal tract (E. coli typically colonizes the gastrointestinal tract of human infants within a few hours after birth), and those strains are non-pathogenic for healthy, immunocompetent humans (Kaper, Nataro et al. 2004). However, some E. coli strains can and do cause illness even in healthy people as well as in pets and in agriculturally important animals such as pigs or poultry. These disease-causing E. coli include Shiga-toxin producing E. coli (STEC, also sometimes referred to as verocytotoxin-producing E. coli or VTEC) (and their subset enterohemorrhagic E. coli or EHEC), enteropathogenic E. coli (EPEC), enterotoxigenic E. coli (ETEC), enteroaggregative E. coli (EAEC), enteroinvasive E. coli (EIEC) diffusely adherent E. coli (DAEC), uropathogenic E. coli (UPEC), meningitis-associated E. coli (MNEC) (including neonatal meningitis-causing E. coli or NMEC), avian pathogenic E. coli (APEC), sepsis-associated E. coli (SAEC), mammary pathogenic E. coli, endometrial pathogenic E. coli, adherent invasive E. coli (AIEC), and necrotoxigenic E. coli (Kaper, Nataro et al. 2004), (Etcheverria, Lucchesi et al. 2016).

[0015] The “pathogenic E. coli strains” as defined herein are STEC (VTEC), EHEC, EPEC, ETEC, EAEC, EIEC, DAEC, UPEC, MNEC (including NMEC), APEC, AIEC, sepsis-associated E. coli, mammary pathogenic E. coli, endometrial pathogenic E. coli, necrotoxigenic E. coli, or a combination thereof. Pathogenic E. coli developed an impressive array of virulence markers that enable them to trigger animal (including human) illness. Some of the virulence factors are summarized in Kaper, Nataro et al. 2004, which is herein incorporated by reference in its entirety. Some example virulence factors include colonization factors, fitness factors, toxins, and effectors. The diseases caused by pathogenic E. coli can be grouped into two main categories: diseases of humans and diseases of animals. Below we briefly discuss both.

### Diseases in Humans

[0016] Arguably the best-known human “pathogenic E. coli” serotype is E. coli O157:H7. This serotype is one of the seven serotypes currently included in the Shiga toxin-producing E. coli (STEC) group (also sometimes referred to as Verocytotoxin-producing E. coli or VTEC) which also includes enterohemorrhagic E. coli or EHEC. It is a major foodborne bacterial pathogen, which was first associated with human illness during an outbreak of hemorrhagic colitis in 1982, and has been listed by the Centers for Disease Control and Prevention as a national notifiable disease since 1994 (Bell, Goldoft et al. 1994), (Scallan, Hoekstra et al. 2011). This bacterium has been estimated to cause >63,000 foodborne illnesses and approximately 61 deaths annually in the United States (Bell, Goldoft et al. 1994), (Rangel, Sparling et al. 2005). E. coli O157:H7 infections are of particular concern in young children and elderly persons because it is associated with hemolytic uremic syndrome which may permanently damage the kidneys (Buzby 2001).

[0017] In addition to being significant to public health, the economic impact of STEC E. coli contamination of foods is substantial. It has been estimated that hospitalizations and deaths due to E. coli O157:H7 infections in the United States may lead to $405 million in medical cost and lost productivity annually (Frenzen, Drake et al. 2005). Furthermore, substantive costs to manufacturers and growers may be incurred in the form of product loss and brand-damaging publicity associated with recalling products contaminated with this bacterium. These costs significantly increase (due to additional legal fees and settlement agreements) if the consumption of those foods results in human illness or mortality and may force the company out of business (Buzby and Roberts 1997), (Buzby and Roberts 2009), (Pennington 2010). For example, a single E. coli O157:H7 outbreak associated with contaminated spinach in 2006 cost the spinach industry between $37 and $74 million. Thus, there are very strong public health and economic incentives to develop novel, environmentally friendly, safe, and effective approaches for managing STEC contamination of a broad range of foods.

[0018] Among other “pathogenic E. coli,” enterotoxigenic Escherichia coli or ETEC are also an important cause of bacterial diarrheal illness, e.g., infection with ETEC is the leading cause of travelers' diarrhea and a major cause of diarrheal disease in lower-income countries, especially among children. Another example of pathogenic E. coli of serious public health concern is enteroinvasive E. coli (EIEC); these bacteria cause a syndrome that is identical to shigellosis, with profuse diarrhea and high fever. Overall, the pathogenic E. coli infections are characterized with diarrhea, vomiting, abdominal pain, and fever—and in some cases serious complications or even death (e.g., STEC E. coli can cause potentially fatal hemolytic uremic syndrome; EPEC remains an important cause of fatal infant diarrhea in developing countries, etc.). Also, meningitis-associated E. coli (MNEC) (including neonatal meningitis-causing E. coli or NMEC)—and especially strains with K1 capsular polysaccharide antigen—remain the most common Gram-negative bacillary organism that cause meningitis (Kim 2016). Adherent-invasive E. coli (AIEC) have been implicated in the pathogenesis of inflammatory bowel disease (IBD), including Crohn's disease (Prudent, Demarre et al. 2021). Another group of pathogenic E. coli, UPEC, are a major cause of urinary tract infections (UTIs). The UTI infections are widespread: about 150 million people worldwide develop UTI each year. Also, it is estimated that 40% of women develop at least one UTI during their lifetime and that 11% of women over 18 years have at least one episode of UTI per year. With roughly eleven-million cases reported in the U.S. alone each year, the costs of UTI infections are estimated $5 billion annually (Terlizzi, Gribaudo et al. 2017). For a review of some of the pathogenic E. coli, See (Kaper, Nataro et al. 2004), herein incorporated by reference in its entirety.

### Diseases in Animals

[0019] Many animals carry E. coli—including pathogenic E. coli—as part of their normal flora. In many instances, such carriage does not cause disease in animals but does present significant public health concern because these E. coli strains can spread from cows, goats, sheep, deer, and other animals to humans where they can trigger various diseases, some of them potentially fatal. However, pathogenic E. coli can and do cause diseases in animals—and some examples are briefly discussed below.

[0020] Various serotypes of enterotoxigenic E. coli (ETEC) can cause either diarrhea or septicemiain young calves (usually during the first 4 days of life). Two main E. coli pathotypes are involved in enteric colibacillosis: enterotoxigenic E. coli (ETEC) and enteropathogenic E. coli (EPEC), with ETEC being the most important pathotype in swine. The ETEC causing neonatal colibacillosis mostly carry the fimbriae F4 (k88), F5 (k99), F6 (987P) or F41, while the ETEC of post-weaning diarrhea carry the fimbriae F4 (k88) and F18. These fimbriae adhere to specific receptors on porcine intestinal brush border epithelial cells (enterocytes), starting the process of enteric infection (Luppi 2017). VTEC (STEC) also can cause edema disease in pigs, usually after weaning and between the age of 4 and 12 weeks. Infection with ETEC harboring the F4 (K88) fimbriae (ETEC F4) is one of the most important causes of postweaning diarrhea in pigs. As noted above, this pathotype is characterized by the expression of an F4 fimbrial adhesin which induces bacterial attachment to specific F4 receptors located in the brush border of the swine intestine and secretion of enterotoxins that cause diarrhea (Fairbrother, Nadeau et al. 2005).

[0021] In many avian animals, including chickens, pathogenic E. coli can cause severe respiratory and systemic diseases, e.g., APEC can cause aerosacculitis, perihepatitis, polyserositis, pericarditis, egg peritonitis, salphingitis, coligranuloma, omphalitis, cellulitis, and osteomyelitis/arthritis, septicemia and other mainly extraintestinal diseases in chickens, turkeys, ducks, and other avian species; these are commonly referred as avian colibacillosis (Dziva and Stevens 2008). Multiple APEC serotypes have been associated with colibacillosis cases in the field outbreaks; however, three serotypes—O1, O2 (including O2:K2, which is one of the most common serotypes among APEC worldwide), and O78 (and especially O78:K80) account for the majority (more than 80%) of the illness (Dho-Moulin and Fairbrother 1999), (Rodriguez-Siek, Giddings et al. 2005), (Ebrahimi-Nik, Bassami et al. 2018).

[0022] Colibacillosis causes losses due to early mortality, condemnation of carcasses and reduced productivity/weight gain (Guabiraba and Schouler 2015). In this context, colibacillosis is one of the leading causes of mortality (up to 20%) and morbidity in poultry and it also results in decreased meat (2% decline in live weight, 2.7% deterioration in feed conversion ratio) and egg production (up to 20%), decreased hatching rates, and increased condemnation of carcasses (up to 43%) at slaughter—and it may be responsible for >50% mortality in young chickens. Overall, APEC costs the poultry industry hundreds of millions of dollars in economic losses worldwide (Ghunaim, Abu-Madi et al. 2014). In the United States, economic losses to the broiler industry can be as high as $40 million annually due to carcass condemnation alone. Antibiotics (tetracyclines, sulfonamides, and aminoglycosides) are frequently used to control colibacillosis in chickens. However, increasing resistance of APEC to different classes of antibiotics, including medically important antibiotics (β-lactams, colistin, and carbapenems), suggests challenges ahead in using antibiotics to control APEC infections in poultry, and highlights the need to identify novel antimicrobial strategies for managing APEC infections. Lytic E. coli bacteriophages subject of this invention may provide one such approach. Interestingly, recent studies have shown that APEC strains share some virulence genes with, and are phylogenetically related to, several E. coli serotypes that are pathogenic in humans, suggesting that APEC strains could potentially pose a health risk to humans as well (Belanger, Garenaux et al. 2011). For a review of APEC, please see (Kathayat, Lokesh et al. 2021), herein incorporated by reference in its entirety.

[0023] Pathogenic E. coli can also cause various diseases in other animal species including pets. For example, EPEC and ETEC have been strongly associated with enteric disease in young dogs (colibacillosis in dogs, usually in the lower intestines) (Beutin 1999). Pathogenic E. coli—many of the strains being multidrug resistant—have also been found in a variety of aquatic wildlife including bottlenose dolphins, harbor seals, elephant seals, and seagulls (van Elk, van Dep Bildt et al. 2007), (Simoes, Poirel et al. 2010), (Greig, Gulland et al. 2014).

### Food Safety and Environmental Contamination

[0024] As noted above, one of the main routes of infection for both humans and animals with pathogenic E. coli is though consuming foods that are contaminated with the bacteria. A variety of treatment strategies are currently employed to eliminate or significantly reduce pathogenic E. coli contamination, ranging from simple washing of foods to chemical or physical decontamination of foods. These methods vary with regard to their efficacy, cost, and impact on the flavor and aesthetic integrity of food. For example, gamma-irradiation is considered to be one of the most effective treatments, capable of reducing E. coli and various other bacteria, by 5 log 10 (Aymerich, Picouet et al. 2008). However, the process is very expensive and more effective (high) levels of gamma irradiation may adversely affect the organoleptic qualities of foods, including taste and appearance (Wheeler, Shackelford et al. 1999). Other strategies involve the application of various antibacterial chemicals, such as calcium hypochlorite, which has been reported to reduce E. coli contamination by 1.5-2.5 logs (Behrsing, Winkler et al. 2000). Unfortunately, many of those chemicals have a negative environmental impact, and their overuse may lead to a decline in efficacy (Mokgatla, Brozel et al. 1998). Importantly, in addition to targeting pathogenic bacteria, both gamma-irradiation and chemical antibacterials target beneficial bacteria, thus negatively impacting the availability of beneficial bacteria in foods (Sulakvelidze and Barrow 2005), (Abuladze, Li et al. 2008), (Carter, Parks et al. 2012), (Moye, Woolston et al. 2018).

[0025] In a somewhat different but related context, contamination of buildings, equipment, food processing facilities, medical facilities, and other facilities of strategic importance with pathogenic bacteria also remains a serious problem, which is compounded by the possibility that they may be intentionally contaminated with virulent bacteria, including pathogenic E. coli, by bioterrorists. Decontamination of such facilities also presents considerable challenges because of the increased resistance of many potentially pathogenic bacteria to traditional sanitizers, including hypochlorous acid (the active form of hypochlorite sanitizers) and benzalkonium chloride (a quaternary ammonium sanitizer) (Davidson and Harrison 2002). Also, many chemical sanitizers are corrosive and toxic and, therefore, are unacceptable for treating foods or surfaces that come into direct contact with foods. Thus, new and novel approaches are needed to aid the prevention of diseases caused by natural or intentional dissemination of pathogenic bacteria on various building materials, or by the ingestion of various foods intentionally or accidentally contaminated with pathogenic E. coli. Ideally, such approaches will be effective, safe, and economical. Lytic bacteriophages subject of this invention may provide one such approach.

[0026] In summary, and as explained above, there remains an urgent and unmet need in the art for new agents and approaches for controlling pathogenic E. coli in several critical areas, including but not limited to human and other animal clinical applications, enhancing gut resilience against pathogenic E. coli colonization and subsequent infection, food safety-related uses, environmental decontamination, and diagnostics.

### SUMMARY OF THE INVENTION

[0027] The invention meets the described needs and more by providing compositions comprising alone or in any combination novel bacteriophage ECML-1 (PTA-127245), ECML-10 (PTA-127246), ECML-123-2 (PTA-121408), ECML183-2 (PTA-127247), ECML-359 (PTA-121406), ECML-363 (PTA-121407), ECML-606-1 (PTA-127248), ECCR-664-1 (PTA-127249), or a combination thereof, said bacteriophages having lytic activity against pathogenic E. coli species strains. In the various embodiments, the combination may include two or more, three or more, four or more, five or more, six or more, or seven or more of the Deposited Bacteriophages. The ATCC deposit number for each phage is provided in the parenthesis. The invention additionally provides methods of using the Deposited Bacteriophages to control, reduce, or prevent colonization or contamination of processed and unprocessed food products by Targeted Bacteria, or colonization/contamination of equipment involved in the processing of the same food product(s), as well as for reducing nosocomial spread of pathogenic E. coli by decontaminating hospital centers and other healthcare facilities that may be contaminated with pathogenic E. coli. The invention additionally provides methods of using the Deposited Bacteriophages to modulate GI tract and/or enhance gut resilience against Targeted Bacteria, by reducing the incidence and/or levels of colonization in various animals (including humans) with Targeted Bacteria. The invention also provides methods of detecting the presence of Targeted Bacteria cells on processed or unprocessed food products or in other environmental or clinical samples. The invention additionally provides methods of using the Deposited Bacteriophages for the removal of antibiotic-resistant or other undesirable pathogens from medical, veterinary, animal husbandry, food processing, and other environments where they may be passed to humans or animals. The invention additionally provides for methods of using the Deposited Bacteriophages to treat, mitigate, or reduce the risk of human and/or other animal diseases caused by Targeted Bacteria.

[0028] For example, one significant need concerns the treatment of processed or unprocessed food products to reduce, eliminate or prevent colonization with undesirable bacteria such as pathogens responsible for food-borne illness and food spoilage organisms. A second critical area of need concerns the removal of undesirable bacteria from industrial environments such as food processing facilities to prevent colonization thereof. A third critical area of need concerns the removal of antibiotic resistant organisms from environments where they may be passed to humans and animals, such as hospitals, nursing homes, veterinary facilities, and other such environments. Additionally, new bacteriophage compositions and methods of using the same are needed for the treatment, mitigation, or reduction of risk of animal and human bacterial disease, particularly those diseases caused by antibiotic-resistant organisms. Furthermore, bacteriophage compositions may be used as pre-biotics or probiotics or nutritional/dietary supplements—alone or in combination with bacteria-based supplements and/or yeast-based supplements—for modulating GI microflora for various health benefits (i.e., the bacteriophages modulate GI tract microflora by specifically lysing undesirable bacteria while leaving desirable microflora intact).

[0029] The Deposited Bacteriophages are provided in order to control the growth of the Targeted Bacteria, which will reduce their ability to contaminate and colonize various environments, including but not limited to (a) raw, unprocessed food products, (b) equipment used to process or manufacture various food products, (c) various food products processed or manufactured with equipment contaminated with the Targeted Bacteria, (d) animals (including humans) contaminated/colonized with the Targeted Bacteria, (e) animal (including human) environments contaminated with the Targeted Bacteria, and (f) various processed food products for humans or animals containing ingredients contaminated with the Targeted Bacteria. The invention also provides methods for providing a prophylactic dosage(s) of the Deposited Bacteriophages, alone or in combination with antibiotics, and/or bacteria-based supplements, and/or yeast-based supplements, that may offer a subject protection against the disease caused by the Targeted Bacteria. The invention also provides methods for detecting the presence of the Targeted Bacteria in processed or unprocessed food products, and in equipment used to process or manufacture the food products. In addition, the invention provides methods of using the Deposited Bacteriophages to remove the Targeted Bacteria from medical, veterinary, animal husbandry, food processing, and other environments where they may be passed to humans or animals. Also, the invention additionally provides methods of using the bacteriophage (either as a pharmaceutical composition or nutritional supplement composition) to treat, mitigate, and reduce the risk of animal and human diseases caused by the Targeted Bacteria.

[0030] The invention meets the described needs and more by providing compositions comprising alone or in any combination novel bacteriophage ECML-1 (PTA-127245), ECML-10 (PTA-127246), ECML-123-2 (PTA-121408), ECML183-2 (PTA-127247), ECML-359 (PTA-121406), ECML-363 (PTA-121407), ECML-606-1 (PTA-127248), ECCR-664-1 (PTA-127249), or a combination thereof, said bacteriophages having lytic activity against the Targeted Bacteria. In the various embodiments, the combination may include two or more, three or more, four or more, five or more, six or more, or seven or more of the Deposited Bacteriophages. The invention additionally provides methods of using the Deposited Bacteriophages to control, prevent, or reduce the risk of the infection or colonization of processed and unprocessed food products by Targeted Bacteria, or colonization of equipment involved in the processing of the same food product(s). The invention additionally provides methods of using the Deposited Bacteriophages to prevent, eradicate, or reduce the levels of colonization of various animals (including humans) with Targeted Bacteria. For example, compositions comprising the Deposited Bacteriophages may be formulated as a pharmaceutical composition (e.g., drug substance) for use by animals, including humans. In another example, compositions comprising the Deposited Bacteriophages may be formulated as nutraceutical composition (e.g., dietary supplement, probiotic, or prebiotic) for use by animals, including humans. This pharmaceutical or nutraceutical composition comprising the Deposited Bacteriophage is administered (including, but not limited to, orally, and/or rectally, and/or intranasally, and/or intravenously, and/or intracerebrally, and/or ureteral, and/or intramuscularly, and/or intradermally) by an animal (including human), which lyses the Targeted Bacteria reducing colonization by the Targeted Bacteria of the animal. In another example, the same pharmaceutical or nutraceutical composition comprising the Deposited Bacteriophage is administered to an animal (including human) regularly for enhancing GI resilience against colonization with the Targeted Bacteria; if and when the Targeted Bacteria in introduced into the said animal, the composition lyses the Targeted Bacteria reducing colonization by the Targeted Bacteria of the animal and subsequent risk of infection and disease.

[0031] In yet another example, the same pharmaceutical or nutraceutical composition comprising the Deposited Bacteriophage is combined with bacteria-based and/or yeast-based preparations for enhanced ability to modulate the animal (including human) microbiome and enhance its resilience against colonization with pathogenic E. coli. The bacteria-based pharmaceutical or nutraceutical preparations can be based on, but are not limited to, strains of Lactobacillus species, including L. acidophilus, L. rhamnosus, L. gasseri, L. reuteri, L. bulgaricus, L. plantarum, L. johnsonii, L. paracasei, L. casei, L. salivarius, or L. lactis, Bifidobacterium species, preferably B. bifidum, B. longum, B. breve, B. infantis, B. lactis, or B. adolescentis, Streptococcus thermophilus, Bacillus cerus, Bacillus subtilis, Enterococcus faecalis, Enterococcus faecium, or a combination thereof. The yeast-based pharmaceutical or nutraceutical preparations can be based on, but are not limited to, strains of Saccharomyces cerevisiae, Saccharomyces boulardii, Saccharomyces cerevisiae var. boulardii, Issatchenkia occidentalis, Lachancea thermotolerans, Metschnikowia ziziphicola, Torulaspora delbrueckii, or a combination thereof.

[0032] The invention also provides methods of detecting the presence of Targeted Bacteria cells on processed or unprocessed food products, or equipment involved in the processing of the same food products. The invention additionally provides methods of using the Deposited Bacteriophages for the removal of antibiotic-resistant or other undesirable pathogens from medical, veterinary, animal husbandry, and other environments where they may be passed to humans or animals.

[0033] The Deposited Bacteriophage has binding specificity for Targeted Bacteria (i.e., pathogenic E. coli) and is capable of lysing Targeted Bacteria. The invention also contemplates progeny, variants, substantially equivalent bacteriophages, and bacteriophage derivative(s) of the Deposited Bacteriophages. In another embodiment, the variants of the Deposited Bacteriophage have the same phenotypic characteristics as the Deposited Bacteriophage. In another embodiment, the variants of the Deposited Bacteriophage have the same lytic specificity for pathogenic E. coli as the Deposited Bacteriophage. In a still another embodiment, the variants of the Deposited Bacteriophage differ genetically from the Deposited Bacteriophage by a single genetic event including but not limited to silent mutations, inversions, deletions, insertions, polymorphisms, or point mutations but still retain the same phenotypic characteristics and lytic specificity for pathogenic E. coli as the Deposited Bacteriophage. In many embodiments, the progeny may be variants of the Deposited Bacteriophage. In one embodiment, the invention provides progeny of the Deposited Bacteriophage having minor variation(s) in the genomic sequence and polypeptides encoded thereby while retaining the same general genotypic and/or phenotypic characteristics as the Deposited Bacteriophage. In particular, these progenies are the result of successive passaging of the Deposited Bacteriophage where the variants accumulate silent mutations, conservative mutations, minor deletions, and/or minor replications of genetic material. The progeny described herein of the Deposited Bacteriophage retain the phenotypic characteristics of the Deposited Bacteriophage, in a preferred embodiment, the progeny retains lytic activity against the Target Bacteria.

[0034] In an embodiment, the invention provides derivatives of the Deposited Bacteriophage comprising substances that constitute subunits or expression products of the Deposited bacteriophage or its progeny, including (but not limited to) phage nucleic acids, partial or complete phage genes, gene expression products (e.g., exopolysaccharide degrading enzymes), and structural components (e.g., polyribonucleotide(s) and polydeoxyribonucleotide(s), including modified or unmodified bacteriophage DNA, cDNA, mRNA and synthetic polynucleotide sequences, as well as DNA/RNA hybrids.) In another embodiment, the invention provides modified polynucleotides (e.g., phosphorylated DNAs) of the Deposited Bacteriophages.

[0035] In an embodiment, the invention provides the use of the Deposited Bacteriophage, and its progeny and derivatives, to control the growth on, or colonization of, processed and unprocessed food products by Targeted Bacteria, or the colonization of buildings and equipment, particularly those associated with the processing of the same food product. The invention also provides methods of identifying Targeted Bacteria as a bacterial diagnostic and/or detecting the presence of Targeted Bacteria on processed or unprocessed food products, or equipment or buildings such as those involved in the processing of the same food products. The invention further provides methods of using the Deposited Bacteriophages and their progeny and derivatives for the removal of antibiotic-resistant or other undesirable pathogens from medical, veterinary, animal husbandry, or any additional environments where they may be passed to humans or animals. The invention additionally provides for methods of using the Deposited Bacteriophages and their progeny and derivatives to treat, mitigate, and/or reduce the risk of human and animal diseases caused by Targeted Bacteria. The Deposited Bacteriophages and their progeny and derivatives are administered for the methods of the invention as a homogenous phage administration, or alternatively as a component of a multi-phage composition comprising several bacteriophages and/or other bacteria-based or yeast-based compositions. These methods of use are provided with greater particularity infra.

[0036] In any one embodiment, one possessing the Deposited Bacteriophage will inevitably be in possession of progeny of the Deposited Bacteriophages. Furthermore, after successive sub culturing (e.g., over 10 passages) of the Deposited Bacteriophages, progeny having genetic variations within the scope of “closely related” organisms as descried by Tenover et al. (Tenover, Arbeit et al. 1995), or “Same Species” as described by (Olm 2017), (Jain, Rodriguez et al. 2018), are present.

[0037] In one embodiment, the invention comprises bacteriophages substantially equivalent to the Deposited Bacteriophages—bacteriophages that are “indistinguishable” from or “closely related” to the Deposited Bacteriophages as these terms are defined in Tenover et al. (Tenover, Arbeit et al. 1995), or fall under the “Same Species” designation as described by (Olm 2017) and (Jain, Rodriguez et al. 2018). In any of the foregoing embodiments, the composition comprises at least one, two, three, four, five, six, seven, or all eight of the Deposited Bacteriophages.

[0038] In another embodiment, a nutraceutical composition may comprise at least one of the Deposited Bacteriophages. The nutraceutical composition may further comprise an excipient, carrier, stabilizer, flavoring, or colorant agent.

[0039] The present invention is directed to novel phage compositions useful in treating food products to minimize or eliminate bacterial contamination by pathogenic E. coli bacteria. The phage compositions can be formulated with suitable carriers.

[0040] The compositions of the present invention may be used for human, veterinary, agricultural or aquacultural purposes. Furthermore, the compositions as described herein may be used for environmental applications. The composition may be used within a cream, lotion, or gel, be admixed with a pharmaceutical carrier and administered topically, orally, rectally, nasally, used as an inhalant, or the antibacterial composition may be added to a feed for animal, aquatic, or avian uses.

[0041] In another embodiment of the invention, isolated progeny of the deposited bacteriophage derived from the deposited bacteriophage.

[0042] Another embodiment of the invention comprises isolated progeny of the progeny of the deposited bacteriophage.

[0043] One embodiment of the invention comprises at least one of the isolated bacteriophage ECML-1 (PTA-127245), ECML-10 (PTA-127246), ECML-123-2 (PTA-121408), ECML183-2 (PTA-127247), ECML-359 (PTA-121406), ECML-363 (PTA-121407), ECML-606-1 (PTA-127248), ECCR-664-1 (PTA-127249), deposited to the American Type Culture Collection, said bacteriophage having lytic activity against pathogenic E. coli strains, and variants thereof, wherein said variants retain the phenotypic characteristics of said bacteriophage and wherein said bacteriophage and variants thereof have lytic activity against pathogenic E. coli strains.

[0044] Another embodiment of the invention comprises at least one progeny of bacteriophage ECML-1 (PTA-127245), ECML-10 (PTA-127246), ECML-123-2 (PTA-121408), ECML183-2 (PTA-127247), ECML-359 (PTA-121406), ECML-363 (PTA-121407), ECML-606-1 (PTA-127248), ECCR-664-1 (PTA-127249), deposited to the ATCC, said bacteriophage having lytic activity against pathogenic E. coli strains, and variants thereof, wherein said variants retain the phenotypic characteristics of said bacteriophage and wherein said bacteriophage and variants thereof have lytic activity against pathogenic E. coli strains.

[0045] Still another embodiment comprises at least one derivative of the bacteriophage of isolated bacteriophage ECML-1 (PTA-127245), ECML-10 (PTA-127246), ECML-123-2 (PTA-121408), ECML183-2 (PTA-127247), ECML-359 (PTA-121406), ECML-363 (PTA-121407), ECML-606-1 (PTA-127248), ECCR-664-1 (PTA-127249) deposited to the ATCC, said bacteriophage having lytic activity against pathogenic E. coli strains, and variants thereof, wherein said variants retain the phenotypic characteristics of said bacteriophage and wherein said bacteriophage and variants thereof have lytic activity against pathogenic E. coli strains, said derivative comprising nucleic acids, partial or complete genes, gene expression products, structural components, or one or more combinations thereof.

[0046] In any of the foregoing embodiments, the composition may comprise at least one derivative of the progeny bacteriophage of isolated bacteriophage ECML-1 (PTA-127245), ECML-10 (PTA-127246), ECML-123-2 (PTA-121408), ECML-183-2 (PTA-127247), ECML-359 (PTA-121406), ECML-363 (PTA-121407), ECML-606-1 (PTA-127248), ECCR-664-1 (PTA-127249) deposited to the ATCC, said bacteriophage having lytic activity against pathogenic E. coli strains, and variants thereof, wherein said variants retain the phenotypic characteristics of said bacteriophage and wherein said bacteriophage and variants thereof have lytic activity against pathogenic E. coli strains, said derivative comprising nucleic acids, partial or complete genes, gene expression products, structural components, or one or more combinations thereof.

[0047] In any of the foregoing embodiments, a composition may comprise an isolated bacteriophage ECML-1 (PTA-127245), ECML-10 (PTA-127246), ECML-123-2 (PTA-121408), ECML183-2 (PTA-127247), ECML-359 (PTA-121406), ECML-363 (PTA-121407), ECML-606-1 (PTA-127248), ECCR-664-1 (PTA-127249) deposited to the ATCC, said bacteriophage having lytic activity against pathogenic E. coli strains, progeny, derivatives, and mixtures thereof. In some embodiments, the composition may be a pharmaceutical composition, nutraceutical product, dietary supplement, probiotic, and/or prebiotic.

[0048] In some embodiments, the composition may be a concentrated aqueous solution or dried powder preparation. In any of the embodiments, the composition comprises one or more of the following ingredients: deionized water, buffer solution, preferably Tris-HCl pH 7.0-7.5, mineral water, sucrose, glycerol, trehalose, dextran, polyethylene glycol, sorbitol, cellulose, tapioca dextrin, hydroxypropyl methylcellulose, gellan gum, gelatin, casein, NaCl, MgSO4, or a mixture thereof.

[0049] One embodiment comprises a method for the treatment, mitigation, and/or reduction of risk of food borne illnesses caused by pathogenic E. coli strains, comprising contacting a food product or products with a microbial growth inhibiting effective amount of a bacteriophage composition comprising at least one of the isolated bacteriophage ECML-1 (PTA-127245), ECML-10 (PTA-127246), ECML-123-2 (PTA-121408), ECML183-2 (PTA-127247), ECML-359 (PTA-121406), ECML-363 (PTA-121407), ECML-606-1 (PTA-127248), ECCR-664-1 (PTA-127249) deposited to the ATCC, said bacteriophage having lytic activity against pathogenic E. coli strains, and variants thereof, wherein said variants retain the phenotypic characteristics of said bacteriophage and wherein said bacteriophage and variants thereof have lytic activity against pathogenic E. coli strains.

[0050] One embodiment comprising a method for the reduction of the incidence of food borne illnesses caused by pathogenic E. coli strains, comprising contacting a food product or products with a microbial growth inhibiting effective amount of a bacteriophage composition comprising at least one of the isolated bacteriophage ECML-1 (PTA-127245), ECML-10 (PTA-127246), ECML-123-2 (PTA-121408), ECML183-2 (PTA-127247), ECML-359 (PTA-121406), ECML-363 (PTA-121407), ECML-606-1 (PTA-127248), ECCR-664-1 (PTA-127249) deposited to the ATCC, said bacteriophage having lytic activity against pathogenic E. coli strains, and variants thereof, wherein said variants retain the phenotypic characteristics of said bacteriophage and wherein said bacteriophage and variants thereof have lytic activity against pathogenic E. coli strains.

[0051] In several embodiments, the contacting described in the methods herein comprises (i) spraying or misting or fogging the bacteriophage composition on the food product(s), or (ii) dipping or soaking the food product(s), or (iii) adding, injecting, or inserting the bacteriophage composition into the food product(s) or food product packaging, with the solution containing a concentration of the bacteriophage composition sufficiently high to inhibit the growth of pathogenic E. coli strains.

[0052] In any embodiment, a method for reducing the risk of bacterial infection (e.g., gastrointestinal disease, urinary tract infection, etc.) or sepsis in a person colonized with bacteria comprising treating the colonized person with a pharmaceutical composition containing bacteriophage of one or more strains of the Deposited Bacteriophage which produce lytic infections in said bacteria, wherein said treatment occurs prior to said colonized person developing an illness due to said bacteria a said treatment reduces the risk of bacterial infection or sepsis in said colonized person, and wherein said treatment of the colonized person reduces the level of colonization with bacteria susceptible to the bacteriophage by at least 50%, wherein said composition is administered intravesicularly, topically, orally, rectally, intraurethrally, ocularly, optically, vaginally, topically, nasally, or via inhalation. Additionally, said bacteria is pathogenic E. coli. In a more preferred embodiment, the bacteriophage composition is an oral tablet, capsule, enteric coated gel cap, tablet, gummy, liquid or syrup, a nasal aerosol, a throat wash, a mouth wash or gargle, a toothpaste, a topical ointment, or rinse solution. In another embodiment, the colonized person is a person having a diarrhea, and the bacteriophage produce lytic infections in bacteria capable of causing diarrhea. In yet another embodiment, the colonized person is a person having urinary tract infection, and the bacteriophage produce lytic infections in bacteria capable of causing UTI.

[0053] In any embodiment, a method for reducing the risk of bacterial infection or sepsis in a person not colonized with pathogenic E. coli bacteria comprising treating the person with a pharmaceutical composition containing bacteriophage of one or more strains of the Deposited Bacteriophage which produce lytic infections in said pathogenic E. coli bacteria, wherein said treatment occurs prior colonization of the person or development an illness due to said bacteria and said treatment reduces the risk of bacterial infection or sepsis in person, and wherein said treatment of the person prevents the colonization with bacteria susceptible to the bacteriophage, wherein said composition is administered intravesicularly, intraurethrally, vaginally, topically, orally, rectally, ocularly, optically, nasally, or via inhalation. In a more preferred embodiment, the bacteriophage composition is an oral tablet, capsule, enteric-coated gel cap, enteric-coated tablet, syrup, gummy, liquid, a nasal aerosol, a throat wash, a mouth wash or gargle, a toothpaste, rinse solution, and a topical ointment. In another embodiment, the person is a person having a diarrhea and bloating, and the bacteriophage produce lytic infections in pathogenic E. coli bacteria causing these symptoms. In yet another embodiment, the person is a person having UTI, and the bacteriophage produce lytic infections in pathogenic E. coli bacteria causing these symptoms.

[0054] In another embodiment of the invention, a composition may comprise at least one of the bacteriophage ECML-1 (PTA-127245), ECML-10 (PTA-127246), ECML-123-2 (PTA-121408), ECML183-2 (PTA-127247), ECML-359 (PTA-121406), ECML-363 (PTA-121407), ECML-606-1 (PTA-127248), ECCR-664-1 (PTA-127249) deposited to the ATCC, said bacteriophage having lytic activity against pathogenic E. coli strains, and variants thereof, wherein said variants retain the phenotypic characteristics of said bacteriophage and wherein said bacteriophage and variants thereof have lytic activity against pathogenic E. coli strains.

[0055] In another embodiment, the composition further comprises a pharmaceutically acceptable carrier wherein the pharmaceutically acceptable carrier is an aerosol, a paste, a powder, a syrup, rinse solution, or an injectable formulation.

[0056] Another embodiment comprises the use of a bacteriophage composition comprising at least one of the isolated bacteriophage ECML-1 (PTA-127245), ECML-10 (PTA-127246), ECML-123-2 (PTA-121408), ECML183-2 (PTA-127247), ECML-359 (PTA-121406), ECML-363 (PTA-121407), ECML-606-1 (PTA-127248), ECCR-664-1 (PTA-127249) deposited to the ATCC, said bacteriophage having lytic activity against pathogenic E. coli strains, and variants thereof, wherein said variants retain the phenotypic characteristics of said bacteriophage and wherein said bacteriophage and variants thereof have lytic activity against pathogenic E. coli strains for reducing the risk of food borne illnesses caused by pathogenic E. coli strains comprising contacting a food product or products with a microbial growth inhibiting effective amount of said bacteriophage composition. In a preferred embodiment, said contacting comprises spraying or misting or fogging the bacteriophage composition on poultry meat (before or after grinding), wheat kernels, flour, or other food product(s), or by dipping or soaking these product(s) in a solution containing a concentration of the bacteriophage composition sufficiently high to inhibit the growth of pathogenic E. coli strains, or adding, injecting or inserting the bacteriophage composition in said concentrations into the food product(s) or package which contains said food product(s).

[0057] In any embodiment, the pharmaceutical composition is formulated as a capsule, tablet, chewable composition, syrup, rinse solution, or gel. In any embodiment, the capsule may be an enteric-coated gel capsule.

[0058] In another embodiment, this invention provides a method of treating, mitigating, and/or reducing the risk of diseases caused by pathogenic E. coli by administering an effective amount of a composition according to the invention to a person in need thereof. In one or more modes of this embodiment, the composition per the invention may be a dietary supplement, a feed additive, a nutraceutical composition, or a pharmaceutical (drug) composition. Such compositions may comprise one or more isolated bacteriophages having lytic activity against pathogenic E. coli strains. The bacteriophages may be selected from a group consisting of ECML-1 deposited under ATCC Deposit Accession No. PTA-127245, ECML-10 deposited under ATCC Deposit Accession No. PTA-127246, ECML-123-2 deposited under ATCC Deposit Accession No. PTA-121408, ECML-183-2 deposited under ATCC Deposit Accession No. PTA-127247, ECML-359 deposited under ATCC Deposit Accession No. PTA-121406, ECML-363 deposited under ATCC Deposit Accession No. PTA-121407, ECML-606-1 deposited under ATCC Deposit Accession No. PTA-127248, ECCR-664-1 deposited under ATCC Deposit Accession No. PTA-127249, or a combination thereof. In any of these embodiments, the person may be an adult, infant, or child, and the child may be less than 5 years of age. In any of these embodiments, the composition may comprise the one or more bacteriophage in amounts of 10⁶ and 10¹² PFU. The composition used in these embodiments may comprise one or more of isolated progeny of the aforementioned bacteriophages. Such progeny may have average nucleotide identity over genome of at least 80%, at least 90%, at least 91%, at least 92%, at least 93%, at least 94%, at least 95%, at least 96%, at least 97%, at least 98%, or at least 99% relative to the aforementioned bacteriophages. Further, the progeny will have lytic activity against pathogenic E. coli strains. In these embodiments, the composition may be formulated as a capsule, gel capsule, enteric coated capsule, microgel, suppository, rinse solution, tablet, chewable composition, syrup, or gel.

[0059] In variants of these embodiments, the composition may further comprise a probiotic bacterium, a probiotic yeast, or both. Such probiotic bacteria may be Lactobacillus species, preferably selected from the group consisting of L. acidophilus, L. rhamnosus, L. gasseri, L. reuteri, L. bulgaricus, L. plantarum, L. johnsonii, L. paracasei, L. casei, L. salivarius, L. lactis, or the probiotic bacteria may be Bifidobacterium species, preferably selected from the group consisting of B. bifidum, B. longum, B. breve, B. infantis, B. lactis, B. adolescentis, or the probiotic bacteria may be selected from the group consisting of Streptococcus thermophilus, Bacillus cerus, Bacillus subtilis, Enterococcus faecalis, Enterococcus faecium, or a combination one or more of these bacterial species. The composition used in this embodiment may comprise the probiotic bacteria in an amount of 100-10 billion Colony Forming Units (CFU). Such probiotic yeast may be selected from the group consisting of Saccharomyces cerevisiae, Saccharomyces boulardii, Saccharomyces cerevisiae var. boulardii, Issatchenkia occidentalis, Lachancea thermotolerans, Metschnikowia ziziphicola, Torulaspora delbrueckii, or a combination thereof. The compositions used in this embodiment may comprise probiotic yeast in an amount of 100-10 billion Colony Forming Units (CFU).

[0060] In variants of these embodiments, the composition may further comprise one or more of other ingredients that enhance prophylactic or therapeutic effect of the deposited bacteriophages. In exemplary embodiments, the pharmaceutical and/or nutraceutical composition is combined with proanthocyanidin, and/or cranberry juice extract, and/or D-mannose, and/or vitamins (preferably vitamin C), and/or acetic acid, and/or celery extract to treat, mitigate, or reduce the risk of urinary tract infections caused by pathogenic E. coli (UPEC in particular). Typically, the composition is administered orally, intravesicularly, intraurethrally, vaginally, topically, rectally, ocularly, optically, nasally, or via inhalation.

[0061] In at least one embodiment, the invention provides a method for the reduction in the incidence of food borne illnesses caused by pathogenic E. coli strains comprising contacting food processing equipment with a microbial growth inhibiting effective amount of a bacteriophage composition comprising at least one of the isolated bacteriophage ECML-1 (PTA-127245), ECML-10 (PTA-127246), ECML-123-2 (PTA-121408), ECML183-2 (PTA-127247), ECML-359 (PTA-121406), ECML-363 (PTA-121407), ECML-606-1 (PTA-127248), ECCR-664-1 (PTA-127249) (deposited to the ATCC), these bacteriophage having lytic activity against pathogenic E. coli strains, and variants thereof, wherein the variants retaining the phenotypic characteristics of the bacteriophage, where the bacteriophage and variants thereof have lytic activity against pathogenic E. coli strains. In any such embodiment, the contact may comprise spraying or misting or fogging the bacteriophage composition on the food processing equipment, dipping or soaking the food processing equipment in a solution containing a concentration of the bacteriophage composition sufficiently high to inhibit the growth of pathogenic E. coli strains, or adding, injecting or inserting the bacteriophage composition into the food processing equipment; or spraying or misting the bacteriophage composition on a surface used in food processing. In exemplary embodiments, the foods are wheat kernels (including outer shell, bran, germ, and endosperm), flour, poultry meat, red meat, shellfish, fruits and vegetables, dairy products, healthy drinks, and ready-to-eat foods.

[0062] In the embodiments of the invention described herein, the pathogenic E. coli strain may be STEC, EHEC, EPEC, ETEC, EAEC, EIEC, DAEC, UPEC, MNEC, or a combination thereof. In particular embodiments, the pathogenic E. coli strain is avian pathogenic E. coli, sepsis-associated E. coli, mammary pathogenic E. coli, endometrial pathogenic E. coli, and necrotoxigenic E. coli, or a combination thereof. In exemplary embodiments, the pathogenic E. coli strains are STEC, EHEC, EPEC, ETEC, EAEC, EIEC, DAEC, UPEC, MNEC, avian pathogenic E. coli, sepsis-associated E. coli, mammary pathogenic E. coli, endometrial pathogenic E. coli, necrotoxigenic E. coli, or a combination thereof.

[0063] In numerous embodiments, the invention provides methods for reducing colonization by pathogenic E. coli bacteria strains of a subject by administration of an effective amount of a nutraceutical composition comprising at least one of the isolated bacteriophage ECML-1 (PTA-127245), ECML-10 (PTA-127246), ECML-123-2 (PTA-121408), ECML183-2 (PTA-127247), ECML-359 (PTA-121406), ECML-363 (PTA-121407), ECML-606-1 (PTA-127248), ECCR-664-1 (PTA-127249) (deposited to the ATCC), the bacteriophage having lytic activity against pathogenic E. coli strains, and variants thereof, where the variants retain the phenotypic characteristics of the bacteriophage, where the bacteriophage and variants thereof have lytic activity against pathogenic E. coli strains. In typical embodiments, the nutraceutical composition is formulated as a capsule, tablet, chewable composition, syrup, or gel. In particular embodiments, the capsule is a gel capsule.

[0064] In many of these embodiments, the subject may be an adult, infant, or child, and the child may be less than 5 years of age.

[0065] In several embodiments, a method for modulating an animal (including human) microbiome by reducing colonization by pathogenic E. coli bacteria strains may comprise administration of an effective amount of a composition comprising at least one of the isolated bacteriophage ECML-1 (PTA-127245), ECML-10 (PTA-127246), ECML-123-2 (PTA-121408), ECML183-2 (PTA-127247), ECML-359 (PTA-121406), ECML-363 (PTA-121407), ECML-606-1 (PTA-127248), ECCR-664-1 (PTA-127249) (deposited to the ATCC), the bacteriophage having lytic activity against pathogenic E. coli strains, and variants thereof, where the variants retain the phenotypic characteristics of said bacteriophage and where the bacteriophage and variants thereof have lytic activity against pathogenic E. coli strains. In particular embodiments, the method reduces colonization of the gastrointestinal tract, vagina, skin, or a combination thereof.

[0066] In several embodiments, a method for maintaining healthy gut microflora by modulating an animal (including human) microbiome by reducing colonization by pathogenic E. coli bacteria strains may comprise administration of an effective amount of a composition comprising at least one of the isolated bacteriophage ECML-1 (PTA-127245), ECML-10 (PTA-127246), ECML-123-2 (PTA-121408), ECML183-2 (PTA-127247), ECML-359 (PTA-121406), ECML-363 (PTA-121407), ECML-606-1 (PTA-127248), ECCR-664-1 (PTA-127249) deposited to the ATCC, said bacteriophage having lytic activity against pathogenic E. coli strains, and variants thereof, wherein said variants retain the phenotypic characteristics of said bacteriophage and wherein said bacteriophage and variants thereof have lytic activity against pathogenic E. coli strains. In one embodiment, the method reduces colonization of the gastrointestinal tract, urinary tract, vagina, skin, or a combination thereof.

[0067] In several embodiments, a dietary supplement, feed additive, nutraceutical, and/or pharmaceutical (drug) composition comprises one or more of the isolated bacteriophage ECML-1 (PTA-127245), ECML-10 (PTA-127246), ECML-123-2 (PTA-121408), ECML183-2 (PTA-127247), ECML-359 (PTA-121406), ECML-363 (PTA-121407), ECML-606-1 (PTA-127248), ECCR-664-1 (PTA-127249) deposited to the ATCC, said bacteriophage having lytic activity against pathogenic E. coli strains, and variants thereof, wherein said variants retain the phenotypic characteristics of said bacteriophage and wherein said bacteriophage and variants thereof have lytic activity against pathogenic E. coli strains. In some aspects, the dietary supplement, feed additive, nutraceutical, and/or pharmaceutical (drug) composition includes at least one probiotic bacteria and/or at least one probiotic yeast. The at least one probiotic bacteria comprises preferably Lactobacillus species, preferably L. acidophilus, L. rhamnosus, L. gasseri, L. reuteri, L. bulgaricus, L. plantarum, L. johnsonii, L. paracasei, L. casei, L. salivarius, or L. lactis, Bifidobacterium species, preferably B. bifidum, B. longum, B. breve, B. infantis, B. lactis, or B. adolescentis, Streptococcus thermophilus, Bacillus cerus, Bacillus subtilis, Enterococcus faecalis, Enterococcus faecium, or a combination thereof. The at least one probiotic yeast comprises preferably Saccharomyces cerevisiae, Saccharomyces boulardii, Saccharomyces cerevisiae var. boulardii, Issatchenkia occidentalis, Lachancea thermotolerans, Metschnikowia ziziphicola, Torulaspora delbrueckii, or a combination thereof.

[0068] In any of the foregoing embodiments, the composition is a pharmaceutical composition, nutraceutical composition, dietary supplement, probiotic, and/or prebiotic.

[0069] In any of the foregoing embodiments, the animal may be already colonized by a pathogenic E. coli strain or strains.

[0070] In any of the foregoing embodiments, the animal may not be colonized by a pathogenic E. coli strain or strains.

[0071] In any of the foregoing embodiments, the bacteriophage may be present in a composition in an amount of 10⁶ and 10¹¹ PFU. In any of the foregoing embodiments, the animal may be a human.

[0072] In any of the foregoing embodiments, the human may be an adult, infant, or child, and the child may be less than 5 years of age.

[0073] In any of the foregoing embodiments, the combination may include two or more, three or more, four or more, five or more, six or more, or seven or more of the isolated bacteriophage ECML-1 (PTA-127245), ECML-10 (PTA-127246), ECML-123-2 (PTA-121408), ECML183-2 (PTA-127247), ECML-359 (PTA-121406), ECML-363 (PTA-121407), ECML-606-1 (PTA-127248), ECCR-664-1 (PTA-127249) deposited to the ATCC and variants thereof.

### BRIEF DESCRIPTION OF THE FIGURES

### Restriction Fragment Length Polymorphism (RFLP) Analysis of Deposited Bacteriophages

[0074] FIG. 1 shows RFLP patterns of the eight Deposited Bacteriophages resulting from digestion with EcoRV.

[0075] FIG. 2 shows a Force Graph activity visualization of the Deposited Phages against 738 E. coli strains.

### DETAILED DESCRIPTION OF THE PREFERRED EMBODIMENTS

### Definitions

[0076] The terminology used in the description of the invention herein is for the purpose of describing particular embodiment only and is not intended to be limiting of the invention. As used in the description of the embodiments of the invention and the appended claims, the singular forms “a”, “an” and “the” are intended to include the plural forms as well, unless the context clearly indicates otherwise. Also, as used herein, “and/or” refers to and encompasses any and all possible combinations of one or more of the associated listed items. Furthermore, “about,” as used herein when referring to a measurable value such as an amount of a compound, dose, time, temperature, and the like, is meant to encompass variations of 20%, 10%, 5%, 1%, 0.5%, or even 0.1% of the specified amount. Unless otherwise defined, all terms, including technical and scientific terms used in the description, have the same meaning as commonly understood by one of ordinary skill in the art to which this invention belongs.

[0077] “Administration,” as used herein, refers broadly to any means by which a composition is given to a subject, be it a patient, healthy or diseased human, or other healthy or diseased animal species.

[0078] “ATCC,” as used herein, refers to the American Type Culture Collection, located in Manassas, Virginia, USA, and Gaithersburg, Maryland, USA.

[0079] “Bacteriophage composition,” as used herein refers broadly to a composition comprising, or alternatively consisting essentially of, or alternatively consisting of, the Deposited Bacteriophage. A “bacteriophage composition” as used herein does not include the Deposited Bacteriophage as it exists in its natural environment prior to isolation and/or substantial purification. Further, a composition may comprise, consist of, or essentially consist of at least one of the Deposited Bacteriophages. Alternatively, the compositions as described herein may comprise, consist of, or essentially consist of at least one, two, three, four, five, six, seven, or all eight of the Deposited Bacteriophages.

[0080] “Bacteriophages substantially equivalent to the Deposited Bacteriophages,” as used herein, refers broadly to those bacteriophages that are “indistinguishable” from or “closely related” to the Deposited Bacteriophages as these terms are defined in (Tenover, Arbeit et al. 1995) for PFGE patterns, and/or in (Olm 2017) (Jain, Rodriguez et al. 2018) for full genome sequence analyses. For example, Tenover et al. describes that organisms are “genetically indistinguishable if their restriction patterns have the same numbers of bands and the corresponding bands are the same apparent size.” (Tenover at page 2235). Epidemiologically, these organisms are “all considered to represent the same strain, i.e., isolates demonstrating the common outbreak pattern represent the outbreak strain.” (Tenover at page 2235). Accordingly, under Tenover, a particular organism is “indistinguishable” from itself or its clone. Tenover describes that an organism is “closely related” if its “PFGE pattern differs from the outbreak pattern by changes consistent with a single genetic event, i.e., a point mutation or an insertion or deletion of DNA. Such changes typically result in two to three band differences.” (Tenover at page 2235). Tenover states that such two to three band differences “have been observed in strains of some species when they are cultured repeatedly over time or isolated multiple times from the same patient.” (Tenover at page 2235). Accordingly, under Tenover et al., progeny of an organism (e.g., descendants of the organism created by serial passage of the organism), for example, are “closely related” to the parent organism (Tenover, Arbeit et al. 1995). For genome-based sequence analysis, Olm and Jain et al. (Olm 2017), (Jain, Rodriguez et al. 2018) define as “Same Species” organisms with the average nucleotide identity over genome (gANI) of ANI≥95%, said criteria used herein for defining bacteriophages substantially equivalent to the Deposited Bacteriophages.

[0081] “Colonization” or “colonized,” as used herein, refers broadly to the presence of Targeted Bacteria on foodstuff(s), or environmental surface(s), or in vivo such as in the gastrointestinal tract, urinary tract, or skin of a mammalian organism without perceptible significant alteration other than the presence of bacteria. The presence of the Targeted Bacteria is non-transient, e.g., the Targeted Bacteria are persistent in or on the colonized foodstuff(s) or environmental surface(s), or growing or multiplying in vivo. The terms “colonization” and “colonized” stand in contrast to the terms “infection” or “infected” which are commonly understood to require perceptible deleterious alteration as part of their definition. “Colonization” and “colonized” may also refer to the presence of bacteria in or on a human or animal without perceptible damage, alteration, or disease.

[0082] “Deposited Bacteriophage,” as used herein, refers broadly to isolated bacteriophages ECML-1 deposited with the ATCC on Jan. 14, 2022 (Deposit Accession No. PTA-127245), ECML-10 deposited with the ATCC on Jan. 14, 2022 (Deposit Accession No. PTA-127246), ECML-123-2 deposited with the ATCC on Jul. 25, 2014 (Deposit Accession No. PTA-121408), ECML183-2 deposited with the ATCC on Jan. 14, 2022 (Deposit Accession No. PTA-127247), ECML-359 deposited with the ATCC on Jul. 25, 2014 (Deposit Accession No. PTA-121406), ECML-363 deposited with the ATCC on Jul. 25, 2014 (Deposit Accession No. PTA-121407), ECML-606-1 deposited with the ATCC on Jan. 14, 2022 (Deposit Accession No. PTA-127248), ECCR-664-1 deposited with the ATCC on Jan. 14, 2022 (Deposit Accession No. PTA-127249).

[0083] Bacteriophage ECML-1 (PTA-127245), ECML-10 (PTA-127246), ECML-123-2 (PTA-121408), ECML183-2 (PTA-127247), ECML-359 (PTA-121406), ECML-363 (PTA-121407), ECML-606-1 (PTA-127248), ECCR-664-1 (PTA-127249) were deposited with the American Type Culture Collection (ATCC) under the Budapest Treaty on the International Recognition of the Deposit of Microorganisms for the Purposes of Patent Procedure.

[0084] Additionally, “Deposited Bacteriophage,” as used herein, refers broadly to isolated bacteriophages ECML-1 (PTA-127245), ECML-10 (PTA-127246), ECML-123-2 (PTA-121408), ECML183-2 (PTA-127247), ECML-359 (PTA-121406), ECML-363 (PTA-121407), ECML-606-1 (PTA-127248), ECCR-664-1 (PTA-127249) deposited with the ATCC, said bacteriophage having lytic activity against pathogenic E. coli strains, and variants thereof, wherein said variants retain the phenotypic characteristics of said bacteriophage and wherein said bacteriophage and variants thereof have lytic activity against pathogenic E. coli strains. In the various embodiments, the Deposited Bacteriophage may be used in combinations including two or more, three or more, four or more, five or more, six or more, or seven or more of the Deposited Bacteriophages.

[0085] All of the Deposited Bacteriophages described herein are lytic not lysogenic phages. The Deposited Bacteriophages have lytic activity against pathogenic E. coli strains.

[0086] “Derivatives,” as used herein, refers broadly to all substances that constitute subunits or expression products of the Deposited Bacteriophage or its progeny, including (but not limited to) phage nucleic acids, partial or complete phage genes, gene expression products, and structural components. For example, derivatives of the invention mean polyribonucleotide(s) and polydeoxyribonucleotide(s), including modified or unmodified bacteriophage DNA, cDNA, mRNA and synthetic polynucleotide sequences, as well as DNA/RNA hybrids. In another example, polynucleotides of the invention encompass modified polynucleotides, such as for example phosphorylated DNAs. In yet another example, gene expression products mean phage-encoded exopolysaccharide degrading enzymes, holins, and lysins.

[0087] “Effective amount,” as used herein, refers broadly to the amount of an isolated bacteriophage that, when administered to an animal (including, but not limited to swine, cattle, poultry, and sheep) and/or human patient for treating a disease, is sufficient to affect such treatment for the disease. The effective amount can be an amount effective for treatment, mitigation, and/or reduction of risk. The effective amount can be an amount effective to reduce the incidence of illnesses, an amount effective to reduce incidence of illnesses, to reduce the severity of illness, to eliminate infection, to slow the development of the infection, to reduce the risk of development of infection or colonization. The “effective amount” can vary depending on the disease and its severity and the age, weight, medical history, predisposition to conditions, preexisting conditions, of the animal or human patient to be treated. The term “effective amount” is taken to be synonymous with “therapeutically effective amount” for purposes of this invention.

[0088] “Isolated,” as used herein, refers broadly to material removed from its original environment in which it naturally occurs, and thus is altered by the hand of man from its natural environment. Isolated material may be, for example, foreign nucleic acid included in a vector system, foreign nucleic acid contained within a host cell, or any material which has been removed from its original environment and thus altered by the hand of man. Isolated material further encompasses bacteriophage specific for the Targeted Bacteria or particular Targeted Bacteria isolates, isolated and cultured separately from the environment in which it was located, where these isolates are present in purified compositions that do not contain any significant amount of other bacteriophage or bacterial strains, respectively.

[0089] “Mammal” as used herein, refers broadly to any and all warm-blooded vertebrate animals of the class Mammalia, including humans, characterized by a covering of hair on the skin and, in the female, milk-producing mammary glands for nourishing the young. Examples of mammals include but are not limited to alpacas, armadillos, capybaras, cats, chimpanzees, chinchillas, cattle, dogs, goats, gorillas, horses, humans, lemurs, llamas, mice, non-human primates, pigs, rats, sheep, shrews, and tapirs. Mammals include but are not limited to bovine, canine, equine, feline, murine, ovine, porcine, primate, and rodent species. Mammal also includes any and all those listed on the Mammal Species of the World maintained by the National Museum of Natural History, Smithsonian Institution in Washington DC, which is hereby incorporated by reference.

[0090] “Avian” as used herein, refers broadly to any and all warm-blooded avian animals including poultry (chickens, ducks, turkeys, geese, guinea fowl and squabs), wildlife, waterfowl, psittacine birds, and game birds.

[0091] “ORF,” as used herein, refers broadly to an Open Reading Frame which is an in-frame sequence of codons that (in view of the genetic code) correspond to or encode a protein or peptide sequence. Two ORFs correspond to each other if the sequences or their complementary sequences encode the same amino acid sequences. An ORF sequence, operably associated with appropriate regulatory sequences, may be transcribed and translated into a polypeptide in vivo. A polyadenylation signal and transcription termination sequence will usually be located 3′ to the coding sequence.

[0092] “Patient” as used herein, refers broadly to any animal, including humans, who is in need of treatment either to alleviate a disease state or to prevent the occurrence or reoccurrence of a disease state. Also, “Patient” as used herein, refers broadly to any animal who has risk factors, a history of disease, susceptibility, symptoms, signs, was previously diagnosed, is at risk for, or is a member of a patient population for a disease. The patient can be a clinical patient such as a human or a veterinary patient such as a companion, domesticated, livestock, exotic, or zoo animal. Animals can be mammals, reptiles, birds, amphibians, or invertebrates.

[0093] “Progeny,” as used herein, refers broadly to replicates of the Deposited bacteriophage, including descendants of the Deposited bacteriophage created by serial passage of the Deposited bacteriophage or by other means well known in the art, or bacteriophage whose RFLP profiles are substantially equivalent to the RFLP profile of the Deposited bacteriophage or those with ANI≥95%. The term substantially equivalent is used to describe variability between organisms in accordance with the standards advanced by Tenover et al. for RFLP patterns (Tenover, Arbeit et al. 1995) or by Olm and Jain et al. for genome sequence analysis (Olm 2017), (Jain, Rodriguez et al. 2018). For example, Tenover teaches the acceptable levels of variation that may be seen when the genomes of identical propagated organisms are electrophoretically analyzed following restriction enzyme digestion. Bacteriophages “substantially equivalent” to the Deposited Bacteriophages are “indistinguishable” from or “closely related” to the Deposited Bacteriophages. Tenover et al. describe a system for interpreting chromosomal DNA Restriction Enzyme digest patterns (“RFLP”) using Pulsed-Field Gel Electrophoresis (PFGE). (Tenover at page 2233). In particular, Tenover et al. set forth various categories of genetic and epidemiologic relatedness including those organisms that are “indistinguishable” from or “closely related” to each other. While Tenover et al. provide a schematic (prophetic) example of PFGE patterns of genetically related bacteria, the same principles being applied for bacteria also apply to bacteriophage, because Tenover is analyzing genomic DNA. For genome sequence-based analysis, Olm (Olm 2017) and Jain et al. (Jain, Rodriguez et al. 2018) define as “Same Species” organisms with ANI≥95% said criteria used herein for defining “Progeny” of the Deposited Bacteriophages.

[0094] “Recombinant bacteriophage,” as used herein, refers broadly to all genetically modified versions of the Deposited Bacteriophage or its progeny, obtained by serial passaging (in vivo or in vitro) or genetic manipulations of the Deposited Bacteriophage or its progeny. Such manipulations include, but are not limited to, serial passaging for selection of desirable properties, and/or introducing genes or gene cassettes encoding alternative proteins or nonfunctional proteins, or noncoding nucleotide sequences into the genome of the Deposited Bacteriophages or removing certain genes or gene cassettes from the Deposited Bacteriophages.

[0095] “Substantially pure,” as used herein refers broadly to material essentially free of any similar macromolecules that would normally be found with it in nature. For example, a substantially pure bacteriophage is in a composition that contains no more than 1% of other bacteriophages.

[0096] “Targeted Bacteria,” as used herein, refers broadly to the pathogenic E. coli strains including STEC, EHEC, EPEC, ETEC, EAEC, EIEC, AIEC, DAEC, UPEC, MNEC, avian pathogenic E. coli, sepsis-associated E. coli, mammary pathogenic E. coli, endometrial pathogenic E. coli, necrotoxigenic E. coli, or a combination thereof.

[0097] “Pathogenic E. coli,” as used herein, refers broadly to the pathogenic E. coli strains including STEC, EHEC, EPEC, ETEC, EAEC, EIEC, AIEC, DAEC, UPEC, MNEC, avian pathogenic E. coli, sepsis-associated E. coli, mammary pathogenic E. coli, endometrial pathogenic E. coli, necrotoxigenic E. coli, or a combination thereof.

[0098] “Therapy” or “therapeutic,” as used herein, refers broadly to treating a disease, arresting, or reducing the development of the disease or its clinical symptoms, and/or relieving the disease, causing regression of the disease or its clinical symptoms. Therapy encompasses prophylaxis, prevention, treatment, cure, regimen, remedy, minimization, reduction, alleviation, reduction of risk, mitigation, and/or providing relief from a disease, signs, and/or symptoms of a disease. Therapy encompasses alleviating a disease state or preventing the occurrence or reoccurrence of a disease state. Therapy encompasses an alleviation of signs and/or symptoms in patients with ongoing disease signs and/or symptoms, e.g., of infection. Therapy also encompasses “prophylaxis” and “prevention”. Prophylaxis includes preventing or reducing the risk of disease occurring subsequent to treatment of a disease in a patient or reducing the incidence or severity of the disease in a patient. The term “reduced”, for purpose of therapy, refers broadly to the clinically significant reduction in signs and/or symptoms. Therapy includes treating relapses or recurrent signs and/or symptoms, e.g., of colonization. Therapy encompasses but is not limited to precluding the appearance of signs and/or symptoms anytime as well as reducing existing signs and/or symptoms and eliminating existing signs and/or symptoms. Therapy includes treating chronic disease (“maintenance”) and acute disease.

[0099] “Variants,” as used herein, refers broadly to bacteriophages that share the same phenotypic characteristics of the Deposited Bacteriophage and share the same lytic activity of the Deposited Bacteriophages against the Targeted Bacteria. Variants also include bacteriophages that are “substantially equivalent” to the Deposited Bacteriophages or are “indistinguishable” from or “closely related” to the Deposited Bacteriophages as described in Tenover et al. for RFLP-based analysis (Tenover, Arbeit et al. 1995), or fall under the “Same Species” classification (i.e., ANI≥95%) as defined by Olm (Olm 2017) and Jain et al. (Jain, Rodriguez et al. 2018) for sequence-based analysis. In some aspects, the variants have an average nucleotide identity over genome of ≥80%, ≥90%, or ≥95% relative to the Deposited Bacteriophage. In some aspects, the variants have an average nucleotide identity over genome of 90%, 93%, 95%, 97%, 98%, or 99% relative to the Deposited Bacteriophage.

[0100] “Microgel,” as used herein, refers to cross-linked or interwoven three-dimensional polymeric networks. The microgels may be hydrogels, which may absorb and retain large amounts of water. The Deposited Bacteriophage or derivatives thereof may be encapsulated in, embedded in, cross-linked to, etc. the microgel. The microgels may undergo abrupt volume changes in response to environmental factors such as temperature, ionic strength, and pH. Accordingly, the physical and chemical properties of the microgel may be customized for controlled release of encapsulated amounts of the Deposited Bacteriophage or derivatives thereof in particular environmental conditions. The microgel may be a biodegradable microgel that includes degradable linkages in the polymer or cross-linker.

### Genome Analysis and Average Nucleotide Identity of the Deposited Bacteriophages

[0101] All deposited bacteriophages were sequenced and assembled. Seven bacteriophages were sequenced on MiSeq with a read length of 2×250 bp. Reads were trimmed for Illumina adapter, length (≥50 bp), quality (q≥20), and assembled using Spades v3.12.0 or Unicycler v0.4.8.0r. Bacteriophage ECCR-664-1 was sequenced on MinION using Native genome sequencing workflow and assembled using Canu (Koren, Walenz et al. 2017) and polished with Oxford Nanopore Technologies' Medaka tool. For seven samples, ECML-1, ECML-10, ECML-123-2, ECML-183-2, ECML-359, ECML-363, and ECML-606-1, the reads assembled into a single circular contig indicating a complete genome assembly was achieved. The assembly was further polished with pilon (Walker, Abeel et al. 2014) to obtain the final genome sequence. Assembly and polishing of ECCR-664-1 reads returned 3-contigs of total length 169532 nt. The assembled genome sizes are presented in Table 1.

TABLE 1
Genome size of the Deposited Bacteriophages

| Phage | Genome length (bp) |
|---|---|
| ECML-1 | 88,695 |
| ECML-10 | 138,298 |
| ECML-123-2 | 163,097 |
| ECML-183-2 | 149,818 |
| ECML-359 | 169,468 |
| ECML-363 | 167,029 |
| ECML-606-1 | 94,968 |
| ECCR-664-1 | 134,406 |

[0102] The GenBank accession numbers for the genome sequences of the deposited bacteriophages are summarized in Table 2.

TABLE 2
ATCC deposit and GenBank accession numbers
of the deposited bacteriophages

| | ATCC | GenBank | GenBank | |
|---|---|---|---|---|
| | Deposit | Accession | Deposit | Released to |
| Phage ID | Number | Number | Date | Public Date |
| ECML-1 | PTA-127245 | OL631478 | Jan. 14, 2022 | Jan. 2, 2024 |
| ECML-10 | PTA-127246 | OL631479 | Jan. 14, 2022 | Jan. 2, 2024 |
| ECML-123-2 | PTA-121408 | OL631480 | Jul. 25, 2014 | Jan. 2, 2024 |
| ECML-183-2 | PTA-127247 | OL631481 | Jan. 14, 2022 | Jan. 2, 2024 |
| ECML-359 | PTA-121406 | OL631482 | Jul. 25, 2014 | Jan. 2, 2024 |
| ECML-363 | PTA-121407 | OL631483 | Jul. 25, 2014 | Jan. 2, 2024 |
| ECML-606-1 | PTA-127248 | OL631484 | Jan. 14, 2022 | Jan. 2, 2024 |
| ECCR-664-1 | PTA-127249 | OL631257 | Jan. 14, 2022 | Jan. 2, 2024 |

[0103] The SEQ ID NO.s for the genome sequences of the deposited phages are summarized in Table 3.

TABLE 3
SEQ ID NO.s of the deposited bacteriophages

| SEQ ID NO. | Phage ID |
|---|---|
| 1 | ECML-363 complete genome |
| 2 | ECCR-664 contig-1 |
| 3 | ECCR-664 contig-2 |
| 4 | ECCR-664 contig-3 |
| 5 | ECML-1 complete genome |
| 6 | ECML-123-2 complete genome |
| 7 | ECML-606-1 complete genome |
| 8 | ECML-183-2 complete genome |
| 9 | ECML-10 complete genome |
| 10 | ECML-359 complete genome |

[0104] The assemblies were compared to the NCBI RefSeq Genome database to identify the closest neighbor. The strain delineation was assessed by calculating average nucleotide identity over genome (gANI) using OrthoANIu algorithm (Yoon, Ha et al. 2017). The assembled contigs were analyzed in a pairwise fashion using a locally installed OrthoANIu on an in-house Linux server. The OrthoANIu tool was run with the default setting to report ≥80% gANI for each genome pair. Sequence delineation was interpreted based on previously published cutoff values presented by Olm et. al. (Olm, Brown et al. 2017) and Jain et al. (Jain, Rodriguez et al. 2018). gANI<80% was considered divergent whereas gANI>99.9 was used to determine if the two sequences were identical as presented below (Olm, Brown et al. 2017), (Jain, Rodriguez et al. 2018).

| | |
|---|---|
| ANI <80% | Divergent genomes |
| ANI 80%-90% | Moderately divergent |
| ANI 90%-95% | Closely related taxa |
| ANI ≥95% | Same species |
| ANI ≥98% | Same genetic clade |
| ANI ≥99.9% | Same strain |

[0105] Based on the classification by Olm et. al. (Olm, Brown et al. 2017) and Jain et. al. (Jain, Rodriguez et al. 2018) bacteriophages with ANI≥95% could be considered “same species” and bacteriophages with a gANI<80% could be considered “divergent.” When applying this classification to the deposited bacteriophages, all deposited bacteriophages are distinct from each other (Table 4). All the bacteriophages are divergent from each other except for the pair ECML-123-2 and ECML-363, which has a gANI value of 95% indicating these are the members of the same species.

TABLE 4
Average nucleotide identity (gANI) of the deposited bacteriophages (%)

| | ECML- | ECML- | ECML- | ECML- | ECML- | ECCML- | ECML- | ECCR- |
|---|---|---|---|---|---|---|---|---|
| | 1 | 10 | 123-2 | 183-2 | 359 | 363 | 606-1 | 664-1 |
| ECML-1 | 100% | <80% | <80% | <80% | <80% | <80% | <80% | <80% |
| ECML-10 | | 100% | <80% | <80% | <80% | <80% | <80% | <80% |
| ECML-123-2 | | | 100% | <80% | <80% | 95% | <80% | <80% |
| ECML-183-2 | | | | 100% | <80% | <80% | <80% | <80% |
| ECML-359 | | | | | 100% | <80% | <80% | <80% |
| ECCML-363 | | | | | | 100% | <80% | <80% |
| ECML-606-1 | | | | | | | 100% | <80% |
| ECCR-664-1 | | | | | | | | 100% |

[0106] A comparison of each bacteriophage to its closest neighbor in the RefSeq Genome database is presented in Table 5. None of the E. coli phages described here were identical to previously published phages. ECML-10, ECML-123-2, ECML-183-2, ECML-363, and ECCR-664-1 were members of the same species as their closest RefSeq Genome database neighbor. ECML-1 and ECML-359 had gANI values of 93.71% and 91.83% and were considered as belonging to closely related taxa as their closest RefSeq Genome sequence. ECML-606-1 was divergent with a gANI value of <80% with Bordetella phage vB_BbrM_PHB04. However, the blast result shows only 73.33% identity over 8% query coverage suggesting that these two phages are significantly divergent. ECML-606-1 did not show any significant similarity to any of the phage genomes in the current database (accessed 12 Oct. 2021). Additionally, a blast-search against database Nucleotide collection (nr/nt) did not identify any identical phages. In summary, all these phages appear to be novel phages with significant distinction from any known and published phages.

TABLE 5
Average nucleotide identity of the deposited bacteriophages
to their closest neighbor in NCBI Reference Genome database

| Deposited | | Accession | | |
|---|---|---|---|---|
| phage | Top blast match | Number | gANI | Comments |
| ECML-1 | Escherichia phage vB_EcoM-VpaE1 | NC_027337.1 | 93.71% | Closely related taxa |
| ECML-10 | Escherichia coli bacteriophage rv5 | NC_011041.1 | 95.68% | Same species |
| ECML-123-2 | Escherichia phage vB_EcoM_DalCa | NC_054908.1 | 96.46% | Same species |
| ECML-183-2 | Escherichia phage tuntematon | NC_052660.1 | 96.74% | Same species |
| ECML-359 | Escherichia phage vB_EcoM_VR26 | NC_028957.1 | 91.83% | Closely related taxa |
| ECCML-363 | Escherichia phage wV7 | NC_019505.1 | 96.57% | Same species |
| ECML-606-1 | Bordetella phage vB_BbrM_PHB04 | NC_047861.1 | <80% | Divergent |
| ECCR-664-1 | Escherichia phage vB_EcoM_JS09 | NC_024124.2 | 96.24% | Same species |

[0107] The genome sequences of the deposited bacteriophage were scanned for motifs associated with various enzymes. Some of the results are summarized below in Table 6.

TABLE 6
Selected Motifs of Deposited Bacteriophage

| | | | | | HNH |
|---|---|---|---|---|---|
| | | Endo- | Murein | Tail | endo- |
| | Holin | lysin | hydrolase | Protein | nuclease |
| ECML-1 | Yes | Yes | No | Yes | Yes |
| ECML-10 | No | No | nudix hydrolase | Yes | Yes |
| ECML-123-2 | Yes | Yes | nudix hydrolase | Yes | Yes |
| ECML-183-2 | No | Yes | cell wall | Yes | Yes |
| | | | hydrolase | | |
| ECML-359 | Yes | No | Yes | Yes | Yes |
| ECML-363 | Yes | Yes | cell wall/ | Yes | Yes |
| | | | nudix hydrolase | | |
| ECML-606-1 | No | No | No | Yes | Yes |
| ECCR-664-1 | Yes | Yes | nudix hydrolase | Yes | Yes |

[0108] A scan of the genomic sequences of the deposited bacteriophage revealed that none of the bacteriophage in Table 6 included genes for amidase, depolymerase, ensolidase, and anti-CRISPR. All of the bacteriophages in Table 6 included genes for tail protein and HNH endonuclease. Phage tail protein are involved in recognition and binding to exterior host bacterial cell receptors and, as such, they are the primary determinants of bacteriophage's host range, i.e., how many strains of the host bacterium the phage can attach to and potentially lyse. HNH endonucleases in bacteriophages play a significant role in phage DNA packaging; phages having HNH are typically incapable of transduction which makes them well-suited for various therapeutic and biocontrol applications. Presence of both these genes in all bacteriophages in Table 6 highlights their lytic nature and strong lytic potential. The bacteriophage ECML-1, ECML-123-2, ECML-359, ECML-363, and ECCR-664-1 all have genes for holin. The bacteriophage ECML-1, ECML-123-2, ECML-183-2, ECML-363, and ECCR-664-1 all have genes for endolysin. The bacteriophage ECML-10, ECML-123-2, ECML-183-2, ECML-359, ECML-363, and ECCR-664-1 all have genes for murein hydrolase or lysin. These genes and their expression products play an important role in the lifecycle of lytic bacteriophages, and namely in the ability of bacteriophages to lyse their targeted bacterial cells. In general, bacteriophage lysis involves two different strategies. Most phages elaborate murein hydrolase (lysin) and membrane protein called holin. At the end of the lytic replication cycle, the endolysin (a peptidoglycan-degrading enzyme) is produced by phages in the host cell. They cleave the peptidoglycan cell wall, thus allowing release of progeny phage into the environment while rupturing the bacterial cell in the process. The holin, a small hydrophobic membrane spanning protein, is essential for the endolysin to translocate across the membrane to enter the periplasm. In other words, the function of the holin is to create a lesion in the cytoplasmic membrane through which the endonuclease/murein hydrolase gains access to the murein layer. The holins oligomerize to form nonspecific holes and that this hole-forming step is the regulated step in phage lysis. Presence of one or all of these genes in the Deposited Bacteriophages highlights their strong lytic potential.

### The Deposited Bacteriophages

[0109] The Deposited Bacteriophages have binding specificity for Targeted Bacteria and are capable of lysing Targeted Bacteria. The invention further contemplates variants of the Deposited Bacteriophage, which are bacteriophage having minor variation(s) in the genomic sequence and polypeptides encoded thereby while retaining the same general genotypic and phenotypic characteristics as the Deposited Bacteriophage. Such variants are considered to be the Deposited Bacteriophages in accordance with the standards advanced by Tenover for RFLP-based analysis (Tenover, Arbeit et al. 1995), or fall under the “Same Species” classification (i.e., ANI≥95%) as advanced by Olm (Olm 2017) and Jain et al. (Jain, Rodriguez et al. 2018) for full genome sequence-based analysis. The invention also contemplates progeny and bacteriophage derivative(s). The progeny, variants, substantially equivalent bacteriophages, and bacteriophage derivative(s) of the Deposited Bacteriophage all retain the same target specificity (e.g., the Targeted Bacteria) and are lytic phages.

[0110] The invention contemplates the use of the Deposited Bacteriophage, and its progeny and derivatives, to control the growth on, or colonization of, processed and unprocessed food products by Targeted Bacteria, or the colonization of buildings and equipment, particularly those associated with the processing of the same food product. The invention also provides methods of identifying Targeted Bacteria as a bacterial diagnostic and/or detecting the presence of Targeted Bacteria on processed or unprocessed food products, or equipment or buildings such as those involved in the processing of the same food products. The invention further provides methods of using the Deposited Bacteriophages for the removal of antibiotic-resistant or other undesirable pathogens from medical, veterinary, animal husbandry, or any additional environments where they may be passed to humans or animals. The invention additionally provides for methods of using the Deposited Bacteriophages to reduce the risk of, mitigate, and/or treat human and animal diseases caused by Targeted Bacteria. The Deposited Bacteriophages are administered for the methods of the invention as a homogenous phage administration, or alternatively as a component of a multi-phage composition comprising several bacteriophages, or alternatively combination of thereof with one or more prebiotic bacterial strain(s) and/or one or more probiotic yeast strain(s). These methods of use are provided with greater particularity infra. In these embodiments, the Deposited Bacteriophage may be used in combinations including two or more, three or more, four or more, five or more, six or more, or seven or more of the Deposited Bacteriophages.

[0111] Using methods and materials known in the art, a person of skill in art in possession of the Deposited Bacteriophage, will inevitably be in possession of progeny of the Deposited Bacteriophages. Indeed, after successive sub culturing of the Deposited Bacteriophages, progeny having genetic variations within the scope of “closely related” organisms are present. Furthermore, again only relaying on methods and materials known in the art, a person of skill in the art in possession of the Deposited Bacteriophage will be able to isolate and identify variants of the Deposited Bacteriophages as described herein. In particular, the variants of the Deposited Bacteriophage having minor variation(s) in the genomic sequence and polypeptides encoded thereby while retaining the same general genotypic and/or phenotypic characteristics as the Deposited Bacteriophage. Such variants are considered to be the Deposited Bacteriophage in accordance with the standards advanced by Tenover for RFLP-based analysis (Tenover, Arbeit et al. 1995), or fall under the “Same Species” classification (i.e., ANI≥95%) as advanced by Olm (Olm 2017) and Jain et al. (Jain, Rodriguez et al. 2018) for full genome sequence-based analysis. In particular, these variants may be the result of successive passaging of the Deposited Bacteriophage where the variants accumulate silent mutations, conservative mutations, minor deletions, and/or minor replications of genetic material. The variants described herein of the Deposited Bacteriophage retain the phenotypic characteristics of the Deposited Bacteriophage, in a preferred embodiment, the variants have lytic activity against the Target Bacteria.

[0112] Furthermore, bacteriophages substantially equivalent to the Deposited Bacteriophages are those bacteriophages that are “indistinguishable” from or “closely related” to the Deposited Bacteriophages under Tenover et al. (RFLP-based analysis) (Tenover, Arbeit et al. 1995) or “Same Species” under Olm (Olm 2017) and Jain et al. (Jain, Rodriguez et al. 2018) (full genome sequence-based analysis). Progeny of an organism (e.g., descendants of the organism created by serial passage of the organism), for example, are “closely related” to the parent organism, or the “Same Species” as the parent organism.

[0113] Additionally, the Deposited Bacteriophages can be used to isolate derivatives, in particular all substances that constitute subunits or expression products of the Deposited bacteriophage or its progeny, including (but not limited to) phage nucleic acids, partial or complete phage genes, gene expression products, and structural components. For example, derivatives of the invention mean lysins (also known as endolysins or murein hydrolases) produced by bacteriophages in order to cleave the cell wall of the host bacterium during the final stage of the lytic cycle. In another example, derivatives of the invention mean polyribonucleotide(s) and polydeoxyribonucleotide(s), including modified or unmodified bacteriophage DNA, cDNA, mRNA, and synthetic polynucleotide sequences, as well as DNA/RNA hybrids. Polynucleotides of the invention also encompass modified polynucleotides, such as for example phosphorylated DNAs. Depending upon the phage, the nucleic acid can be either DNA or RNA but not both and it can exist in various forms. Further, the nucleic acids of phages often contain unusual or modified bases. These modified bases protect phage nucleic acid from nucleases that break down host nucleic acids during phage infection. The size of the nucleic acid varies depending upon the phage. The phages can have only enough nucleic acid to code for 3-5 average size gene products while some phages may code for over 100 gene products.

The Targeted Bacteria—Pathogenic E. coli

[0114] E. coli encompasses an enormous population of bacteria that exhibit a very high degree of both genetic and phenotypic diversity, grouped in about 190 serogroups (Stenutz, Weintraub et al. 2006). While almost any E. coli from this enormous population can trigger human or animal disease, the subject of this invention is focused on targeting only a subset of E. coli strains (“Targeted Bacteria” or “Pathogenic E. coli”) that include (1) Shiga-toxin producing E. coli (STEC, also sometimes referred to as verocytotoxin-producing E. coli or VTEC), (2) enterohemorrhagic E. coli or EHEC, (3) enteropathogenic E. coli (EPEC), (4) enterotoxigenic E. coli (ETEC), (5) enteroaggregative E. coli (EAEC), (6) enteroinvasive E. coli (EIEC), (7) diffusely adherent E. coli (DAEC), (8) uropathogenic E. coli (UPEC), (9) meningitis-associated E. coli (MNEC) (including neonatal meningitis-causing E. coli or NMEC), (10) avian pathogenic E. coli (APEC), (11) sepsis-associated E. coli (SAEC), (12) mammary pathogenic E. coli, (13) endometrial pathogenic E. coli, (14) adherent invasive E. coli (AIEC), and (15) necrotoxigenic E. coli. For additional information about E. coli in general, and Targeted Bacteria in particular, see section “E. coli Bacteria.”

Use of the Deposited Bacteriophages and their Progeny

### Compositions

[0115] The Deposited Bacteriophage, and its progeny and derivatives, may be used to control the growth on, or colonization of, processed and unprocessed food products by Targeted Bacteria, or the colonization of buildings and equipment, particularly those associated with the processing of the same food product. The invention also provides methods of identifying Targeted Bacteria as a bacterial diagnostic and/or detecting the presence of Targeted Bacteria on processed or unprocessed food products, or equipment or buildings such as those involved in the processing of the same food products. Methods of using the Deposited Bacteriophages include for the removal of antibiotic-resistant or other undesirable pathogens from medical, veterinary, animal husbandry, or any additional environments where they may be passed to humans or animals. Methods of using the Deposited Bacteriophages to reduce the risk of, mitigate, and/or treat human and animal diseases caused by Targeted Bacteria comprise administration of an effective amount of the Deposited Bacteriophage. The Deposited Bacteriophages are administered for the methods of the invention as a homogenous phage administration, or alternatively as a component of a multi-phage composition comprising several bacteriophages. These methods of use are provided with greater particularity infra.

[0116] The Deposited Bacteriophage are formulated in compositions containing the bacteriophage and a carrier and can be stored as a concentrated aqueous solution or dried powder preparation, where dry powder preparation is obtained by convection drying, bed drying, drum drying, freeze drying (lyophilization), microwave-vacuum drying, shelf drying, electrostatic drying, infrared radiation drying, fluidized bed drying, or spray drying.

[0117] The Deposited Bacteriophage may be formulated in a chewable or gel cap or tablet composition, for example comprising gelatin, water, and the Deposited Bacteriophage, optionally including citric acid, sugar, pectin, and combinations thereof. The Deposited Bacteriophage may be formulated for oral administration with probiotic bacteria, preferably Lactobacillus species, preferably L. acidophilus, L. rhamnosus, L. gasseri, L. reuteri, L. bulgaricus, L. plantarum, L. johnsonii, L. paracasei, L. casei, L. salivarius, or L. lactis, Bifidobacterium species, preferably B. bifidum, B. longum, B. breve, B. infantis, B. lactis, or B. adolescentis, Streptococcus thermophilus, Bacillus cerus, Bacillus subtilis, Enterococcus faecalis, Enterococcus faecium, or a combination thereof. The probiotic bacteria may be included in the composition in an amount of 1-10 billion Colony Forming Units (CFU), preferably 100-10 billion CFU.

[0118] The Deposited Bacteriophage may be formulated in a chewable or gel cap or tablet composition, for example comprising gelatin, water, and the Deposited Bacteriophage, optionally including citric acid, sugar, pectin, and combinations thereof. The Deposited Bacteriophage may be formulated for oral administration with probiotic yeast, preferably Saccharomyces cerevisiae, Saccharomyces boulardii, Saccharomyces cerevisiae var. boulardii, Issatchenkia occidentalis, Lachancea thermotolerans, Metschnikowia ziziphicola, Torulaspora delbrueckii, or a combination thereof. The probiotic yeast may be included in the composition in an amount of 1-10 billion Colony Forming Units (CFU), preferably 100-10 billion CFU. Phages may be included in the composition in an amount of 100-one quadrillion Plague Forming Units (PFU), preferably 1,000-100 billion PFU.

[0119] The Deposited Bacteriophage may be formulated in a chewable or gel cap or tablet composition, for example comprising gelatin, water, and the Deposited Bacteriophage, optionally including citric acid, sugar, pectin, and combinations thereof. The Deposited Bacteriophage may be formulated for oral administration with probiotic bacteria, including but not limited to Lactobacillus species, preferably L. acidophilus, L. rhamnosus, L. gasseri, L. reuteri, L. bulgaricus, L. plantarum, L. johnsonii, L. paracasei, L. casei, L. salivarius, or L. lactis, Bifidobacterium species, preferably B. bifidum, B. longum, B. breve, B. infantis, B. lactis, or B. adolescentis, Streptococcus thermophilus, Bacillus cerus, Bacillus subtilis, Enterococcus faecalis, Enterococcus faecium, or a combination thereof) and probiotic yeast (preferably Saccharomyces cerevisiae, Saccharomyces boulardii, Saccharomyces cerevisiae var. boulardii, Issatchenkia occidentalis, Lachancea thermotolerans, Metschnikowia ziziphicola, Torulaspora delbrueckii, or a combination thereof). The probiotic bacteria may be included in the composition in an amount of 1-10 billion CFU, preferably 100-10 billion CFU; the probiotic yeast may be included in the composition in an amount of 1-10 billion CFU, preferably 100-10 billion CFU; and phage may be included in the composition in an amount of 100-one quadrillion PFU, preferably 1,000-100 billion PFU.

[0120] Bacteriophage may be formulated by resuspending purified phage preparation in aqueous medium, such as deionized water, buffer solution (e.g., Tris-HCl pH 7.4), mineral water, 5% sucrose solution, glycerol, dextran, polyethylene glycol, sorbitol, or other formulations that maintain phage viability, and are non-toxic to humans. Suitable formulations, wherein the carrier is a liquid, for administration (e.g., a nasal spray or as nasal drops, include aqueous or oily solutions of the active ingredient.) The bacteriophage may be formulated in a chewable or enteric-coated gel capsule/tablet composition comprising deionized water, buffer solution, preferably Tris-HCl pH 7.4, mineral water, 5% sucrose solution, glycerol, dextran, polyethylene glycol, sorbitol, cellulose, tapioca dextrin, hydroxypropyl methylcellulose, gellan gum, or a mixture thereof. The bacteriophage may be formulated in a chewable composition comprising polyethylene glycol, preferably PEG 3350, a sweetening agent, preferably a sugar, a polymer, preferably pectin, an organic acid, preferably citric acid, and a polyol, preferably maltitol.

[0121] A spray (including coarse spray, fine spray, mist-like spray, or fog-like spray) comprising a composition of the present invention can be produced by forcing a suspension or solution of a compound disclosed herein through a nozzle under pressure. The nozzle size and configuration, the applied pressure, and the liquid feed rate can be chosen to achieve the desired output and particle size. An electrospray can be produced, for example, by an electric field in connection with a capillary or nozzle feed.

[0122] The Deposited Bacteriophage may be formulated in pharmaceutical compositions containing the bacteriophage and a pharmaceutically acceptable carrier and can be stored as a concentrated aqueous solution or dried (e.g., spray dried or lyophilized) powder preparation. Concentrated aqueous solutions may comprise an aqueous solution with a small volume (e.g., 0.1 mL to 1 mL) and bacteriophage in an amount of about 10⁶ and 10¹¹ PFU/mL. The concentrated aqueous solution comprising a Deposited Bacteriophage may comprise the bacteriophage at about 1×10⁶ PFU/mL, 1×10⁸ PFU/mL, 1×10⁹ PFU/mL, or 1×10¹¹ PFU/mL. For example, the concentrated aqueous solution may comprise 1 mL to 10 mL of a Deposited Bacteriophage at about 1×10¹¹ PFU/mL. The aqueous solution may have a pH of pH 6.5-7.5.

[0123] The Deposited bacteriophage may be formulated as a frozen composition comprising LB broth and glycerol, e.g., 70% LB broth-30% glycerol, and stored at −20° C. to −80° C.

[0124] The Deposited bacteriophage may be formulated for oral administration by resuspending purified phage preparation in aqueous medium, such as deionized water, mineral water, 5% sucrose solution, glycerol, dextran, polyethylene glycol, sorbitol, or such other formulations that maintain phage viability, and are non-toxic to humans. Alternatively, the pharmaceutical composition can further comprise an adjuvant. The pharmaceutical composition may contain other components so long as the other components do not reduce the effectiveness of the bacteriophage so much that the therapy is negated. Pharmaceutically acceptable carriers are well known, and one skilled in the pharmaceutical art can easily select carriers suitable for particular routes of administration (Remington's Pharmaceutical Sciences, Mack Publishing Co., Easton, PA., 1985).

[0125] The pharmaceutical compositions containing Deposited Bacteriophage may be administered by parenteral (subcutaneously, intramuscularly, intravenously, intraperitoneally, intrapleurally, intravesicularly or intrathecally), topical, oral, rectal, inhalation, ocular, vaginal, optic, bladder irrigation, or nasal route, as necessitated by choice of drug and disease.

[0126] The Deposited Bacteriophage may be formulated in a pharmaceutical composition, as a dietary supplement (alone or in combination with other bacteria-based and/or yeast-based supplements), probiotic, and/or prebiotic that reduces or eliminates colonization of GI tract (including oral cavity), urinary tract, vagina, or skin with pathogenic E. coli. In effect, the Deposited Bacteriophage may be used to modulate a patient's microbiome.

[0127] The Deposited Bacteriophage may be used in a method for prophylactic treatment of a subject comprising administering the Deposited Bacteriophage to the subject in an amount sufficient to reduce pathogenic E. coli by at least 50%. In this method, the alteration of normal microflora of the individual is minimized. The subject may be a human. The Deposited Bacteriophage may be administered periodically, for example daily. The Deposited Bacteriophage can be administered in a tablet, capsule, or food or drinking additive. Additionally, a method for maintaining normal flora in a population may comprise administering the Deposited Bacteriophage to a subject in an amount sufficient to reduce pathogenic E. coli bacteria by at least 50%, whereby alteration of normal microflora is minimized. The amount administered may be an amount sufficient to eliminate pathogenic E. coli bacteria.

[0128] The invention provides a nutraceutical composition comprising at least one of the Deposited Bacteriophages, progeny, and/or variants thereof and a suitable carrier.

[0129] The Deposited Bacteriophage(s) of the invention may be administered in a powdered form in combination with additional components. The additional components can include stabilizing agents, such as salts, preservatives, bacteria-based supplements, yeast-based supplements, natural/homeopathic supplements such as cranberry juice extract and/or tea extract, and antibiotics. The additional components can also include nutritive components, such as those used to make a nutrient broth as described herein, or other useful components as determined by one skilled in the art.

[0130] The Deposited Bacteriophage may be administered in pharmaceutical compositions containing the Deposited Bacteriophage and a microgel. For example, the Deposited Bacteriophage may be encapsulated in, embedded in, crosslinked to, etc. the water soluble microgel. In some embodiments, the composition of the microgel is adapted to release the Deposited Bacteriophage in the environmental conditions found inside of a macrophage. In some embodiments, the microgel may be prepared by cross-linking polymers formed from anionic monomers and polymers formed from ionic monomers. For example, a microgel may be prepared by cross-linking poly(acrylic acid) (“PAA”) with poly(ethyleneglycol) (“PEG”) to form a poly(acrylic acid)-poly(ethyleneglycol) (PAA-PEG) microgel or hydrogel. In such embodiments, the PAA may have a molecular weight of about 25,000, the PEG may have a molecular weight of about 5,000, and the microgel may have a degree of crosslinking of about 35%. In another example, the microgel may include nanosized polymeric microgel particles including a cross-linked polymer network of polyionic segments and neutral segments as described in Vinogradov (Vinogradov 2006). Exemplary polyionic segments may be polyethylenimine (PEI) and/or PAA. Exemplary neutral segments may be PEG or Pluronic. In all embodiments, the Deposited Bacteriophage is included in 10\hat{ }6-10\hat{ }12 PFU/g of microgel, preferably 10\hat{ }7-10\hat{ }42 PFU/g microgel.

[0131] In some embodiments, the pharmaceutical compositions containing the Deposited Bacteriophage and the microgel may be adapted for macrophage-targeted delivery. In such embodiments, the microgel containing the Deposited Bacteriophage may be formed into a plurality of microgel particles that are sized to be suitable for phagocytosis by macrophages which may enhance ability of the Deposited Bacteriophages to manage infections caused by intracellular bacterial pathogens that are internalized by macrophages as part of the immune response. For example, the microgel particles may have diameters of about 1 μm to about 4 μm. In some embodiments, non-mammalian carbohydrates such as mannose, chitosan, and β-glucan may be incorporated into the microgel particles to induce phagocytosis of the microgel particles by macrophages. For example, β-glucan may be hybridized into the microgel particles. In some embodiments, the microgel particles including the Deposited Bacteriophage may be injected into a patient. In some embodiments, the microgel particles including the Deposited Bacteriophage may be intravenously administered to a patient. In some embodiments, the microgel particles including the Deposited Bacteriophage may be orally administered to a patient.

[0132] A nutraceutical composition of this invention may comprise at least one Deposited Bacteriophage in combination with an acceptable carrier. Examples of acceptable carriers include a solid, gelled, or liquid diluent, or an ingestible capsule. One or more of the bacteriophages of the invention, or a mixture thereof, may be administered orally in the form of a pill dosage form comprising the bacteriophage in combination with an acceptable carrier. A unit dosage of the bacteriophage may also be administered without a carrier material.

[0133] A nutraceutical composition comprising at least one Deposited Bacteriophage in combination with an acceptable carrier may be in the form of a capsule (e.g., enteric coated capsule), tablet, gel, syrup, or chewable composition (e.g., gummy bear). A chewable composition may comprise a binding agent, a sweetener, and at least one Deposited Bacteriophage. Pectin, food starch, gum, or any combination thereof may be used as the binding agent in the chewable composition. The chewable compositions may also include a flavoring agent, vitamins, carriers, excipients, or a combination thereof. For example, a chewable composition (e.g., gummy bear) may comprise a gummy bear mixture of sugar, glucose syrup, starch, flavoring, food coloring, citric acid, and/or gelatin, and at least one Deposited Bacteriophage. Another example of a chewable composition (e.g., gummy bear) may comprise a mixture of deionized water, buffer solution, preferably Tris-HCl pH 7.4, mineral water, 5% sucrose solution, glycerol, dextran, polyethylene glycol, sorbitol, cellulose, tapioca dextrin, hydroxypropyl methylcellulose, gellan gum, or a mixture thereof.

[0134] The nutraceutical compositions of the invention may include dietary supplements, pre-biotics, probiotics, and may be prepared in many forms that include tablets, hard or soft gelatin capsules, aqueous solutions, suspensions, and liposomes and other slow-release formulations, such as shaped polymeric gels. For example, a pill composition may comprise at least one dried Deposited Bacteriophage contained in a size “00” gel cap. An oral dosage form may be formulated such that the bacteriophage(s) of the invention are released into the intestine after passing through the stomach, to protect phage from the acidic environment (typical pH of 1.5 to 3.5) of the stomach (e.g., in enteric coated gel caps, preferably in size “0” or “00,” with the capsule capacity of 408-816 mg or 546-1,092 mg, respectively).

[0135] Oral liquid nutraceutical compositions may be in the form of, for example, aqueous or oily suspensions, solutions, emulsions, syrups, or elixirs, or may be presented as a dry product for constitution with water or other suitable vehicle before use. Such liquid compositions may contain conventional additives such as suspending agents, emulsifying agents, non-aqueous vehicles (which may include edible oils), or preservatives. For example, a gel may comprise at least one Deposited Bacteriophage.

[0136] Oral liquid nutraceutical compositions may be in the form of, for example, aqueous or oily suspensions, solutions, emulsions, syrups, or elixirs, or may be presented as a dry product for constitution with water or other suitable vehicle before use. Such liquid compositions may contain conventional additives such as suspending agents, emulsifying agents, non-aqueous vehicles (which may include edible oils), or preservatives. For example, a gel may comprise at least one Deposited Bacteriophage. In another example, an enteric capsule may comprise of at least one Deposited Bacteriophage and at least one probiotic bacteria. In yet another example, an enteric capsule may comprise of at least one Deposited Bacteriophage, at least one probiotic bacteria, and at least one probiotic yeast.

[0137] A pharmaceutical composition comprising at least one Deposited Bacteriophage in combination with a pharmaceutically acceptable carrier may be in the form of a rinse solution, capsule, tablet, gel, syrup, or chewable composition (e.g., gummy bear). A chewable composition may comprise a binding agent, a sweetener, and at least one Deposited Bacteriophage. Pectin, food starch, gum, or any combination thereof may be used as the binding agent in the chewable composition. The chewable compositions may also include a natural flavor, vitamins, carriers, excipients, or a combination thereof. For example, a chewable composition (e.g., gummy bear) may comprise a gummy bear mixture of sugar, glucose syrup, starch, flavoring, food coloring, citric acid, and/or gelatin, and at least one Deposited Bacteriophage. For example, a chewable composition (e.g., gummy bear) may comprise a mixture of deionized water, buffer solution, preferably Tris-HCl pH 7.4, mineral water, 5% sucrose solution, glycerol, dextran, polyethylene glycol, sorbitol, cellulose, tapioca dextrin, hydroxypropyl methylcellulose, gellan gum, or a mixture thereof.

[0138] The bacteriophages according to the invention may also be formulated for parenteral administration (e.g., by injection, for example, bolus injection or continuous infusion) and may be presented in unit dosage form in ampules, prefilled syringes, small volume infusion containers or multi-dose containers with an added preservative. The pharmaceutical compositions may take such forms as suspensions, solutions, or emulsions in oily or aqueous vehicles, and may contain formulatory agents such as suspending, stabilizing and/or dispersing agents. Alternatively, the bacteriophage(s) of the invention may be in powder form, obtained by drying from solution, for constitution with a suitable vehicle, e.g., sterile saline, before use. Methods for use of bacteriophage in injectable form have been described (Merril, Biswas et al. 1996).

[0139] The bacteriophages according to the invention may also be formulated as a rinse solution for rinsing urinary tract or bladder irrigation (e.g., for reducing the risk of, mitigating, or treating UTI) and may be presented in unit dosage form in ampules, prefilled syringes, small volume infusion containers or multi-dose containers with an added preservative. The pharmaceutical compositions may take such forms as suspensions, solutions (e.g., 0.25% acetic acid solution), or emulsions in oily or aqueous vehicles, and may contain formulatory agents such as suspending, stabilizing and/or dispersing agents. The pharmaceutical compositions may further be formulated/combined with sterile saline, acetic acid, or traditional antibiotic (e.g., neomycin-polymyxin) solutions. The nutraceutical compositions may take such forms as suspensions, solutions, syrups, gel caps, capsules, tablets, and gummy bears that may contain formulatory agents such as suspending, stabilizing and/or dispersing agents. The nutraceutical compositions may be further formulated/combined with one or more of other (e.g., natural/homeopathic) ingredients that enhance prophylactic or therapeutic effect of deposited bacteriophages in managing UTI infections. In exemplary embodiments, the nutraceutical composition is combined with proanthocyanidin, and/or cranberry juice extract, and/or D-mannose, and/or vitamins (preferably vitamin C), and/or acetic acid, and/or celery extract to reduce the risk of, mitigate, or treat urinary tract infections caused by UPEC whereas the composition is administered orally or as a urinary tract rinse. Alternatively, the bacteriophage(s) of the invention may be in powder form, obtained by drying from solution, for constitution with a suitable vehicle, e.g., sterile saline, before use.

[0140] For topical administration to the epidermis, the bacteriophage(s) may be formulated as rinse solutions, ointments, creams, or lotions. Ointments and creams may, for example, be formulated with an aqueous or oily base with the addition of suitable thickening and/or gelling agents. Lotions may be formulated with an aqueous or oily base and will in general also contain one or more emulsifying agents, stabilizing agents, dispersing agents, suspending agents, thickening agents, or coloring agents.

[0141] Pharmaceutical compositions or nutraceutical compositions suitable for topical administration in the mouth include unit dosage forms such as lozenges comprising a bacteriophage(s) of the invention in a flavored base, usually sucrose and acadia or tragacanth. Pastilles comprising one or more bacteriophages in an inert base such as gelatin and glycerin or sucrose and acacia are also provided. Mucoadherent gels and mouthwashes comprising a bacteriophage(s) of the invention in a suitable liquid carrier are additionally provided.

[0142] The present invention relates to stabilized bacteriophage formulations and their use as delivery systems. More particularly, the present invention pertains to stabilized bacteriophage formulations, methods for preparing stabilized bacteriophage formulations and uses of stabilized bacteriophage formulations. For example, a pharmaceutical composition or nutraceutical composition may comprise at least one of the Deposited Bacteriophages and a water-soluble polymer and sugar, derivatives of cellulose, or polyvinylpyrrolidone low or medium molecular, or glycols with a molecular weight of 4000 or 6000, or sodium alginate, and sugars—trehalose and/or maltodextrin and/or lactose and/or mannitol as cellulose derivatives used sodium salt of carboxymethylcellulose, or a mixture thereof.

[0143] The present invention provides a method for producing a composition comprising, adsorbing an aqueous solution of bacteriophages, or phage components, onto a solid or powdered matrix to produce composition, and drying the composition to produce a composition, when drying is accomplished by convection drying, bed drying, drum drying, freeze drying (lyophilization), microwave-vacuum drying, shelf drying, infrared radiation drying, electrostatic drying, fluidized bed drying, or spray drying.

[0144] The present invention also pertains to the method described above wherein the matrix may be selected from the group consisting of skim milk powder, soya protein powder, whey protein powder, albumin powder, casein, gelatin, single cell proteins, algal protein, plant peptone, trehalose, maltodextrin, mannitol, powdered sugar, sugar alcohol, charcoal, latex beads, a water-soluble carbohydrate-based material, talc, chitin, and fish cartilage.

[0145] The present invention also provides a nutraceutical composition comprising at least one Deposited Bacteriophage, or phage component, adsorbed onto a matrix. For example, a nutraceutical composition comprising at least one Deposited Bacteriophage, or phage component, adsorbed onto dry animal feed for delivering effective dose of the Deposited Bacteriophage or phage component to animals in need of reducing the risk of, mitigating, or treating disease caused by the Targeted Bacteria.

[0146] The present invention also provides a pharmaceutical composition comprising at least one Deposited Bacteriophage, or phage component, adsorbed onto a matrix. For example, a pharmaceutical composition comprising at least one Deposited Bacteriophage, or phage component, adsorbed onto dry animal feed for delivering effective dose of the Deposited Bacteriophage or phage component to animals in need of reducing the risk of, mitigating, or treating disease caused by the Targeted Bacteria.

[0147] The present invention includes the material as defined above, wherein the soluble matrix is selected from the group consisting of dry animal feed, skim milk powder, soya protein, albumin powder, single cell proteins, trehalose, mannitol, sugar, and sugar alcohol.

[0148] The compositions of the present invention are easy to prepare and exhibit the property of being stable over various lengths of time at refrigerator and room temperatures, from about −10° C. to about 25° C.

[0149] Compositions of the present invention with little or no loss in titer. The antibacterial compositions of the present invention may be used within lotions, lubricants, gels and creams, suppositories, toothpaste, be admixed with a pharmaceutically acceptable carrier for oral, nasal, or topical applications for example but not limited to skin, vaginal, ophthalmic, nasal, aural, urinary, anal, rectal, and other types of administration, or be used within wound dressings, and exhibit antimicrobial activity.

[0150] The present invention provides stabilized phage preparations in a dry form as a storage and/or delivery system for powder formulations. The present invention also provides a suitable matrix for preparing phage or phage compositions for encapsulation or mixing with dry animal feed and delivery to the animal gut past the stomach acids.

[0151] The present invention provides stabilized phage preparations in a dry form as a delivery system for powder inhalants. The present invention also provides a suitable matrix for preparing phage or phage compositions for encapsulation and delivery to the human gut past the stomach acids.

[0152] Pharmaceutical compositions or nutraceutical compositions suitable for rectal administration are most preferably presented as unit dose suppositories. Suitable carriers include saline solution, nutrient broths, and other materials commonly used in the art. Compositions suitable for vaginal administration may be presented as pessaries, tampons, creams, gels, pastes, foams, or sprays that contain a carrier in addition to a bacteriophage. Such carriers are well known in the art.

[0153] For administration by inhalation, the bacteriophage(s) according to the invention are conveniently delivered from an insufflator, nebulizer, or a pressurized pack or other convenient means of delivering an aerosol spray. Pressurized packs may comprise a suitable propellant such as dichlorodifluoromethane, trichlorofluoromethane, dichlorotetrafluoroethane, carbon dioxide or other suitable gas. In the case of a pressurized aerosol, the dosage unit may be determined by providing a valve to deliver a metered amount.

[0154] Alternatively, for administration by inhalation or insufflation, the bacteriophage(s) of the invention may take the form of a dry powder composition, for example, a powder mix of the bacteriophage(s) and a suitable powder base such as lactose or starch. The powder composition may be presented in unit dosage form in, for example, capsules or cartridges or, e.g., gelatin or blister packs from which the powder may be administered with the aid of an inhalator or insufflator. For intra-nasal administration, the bacteriophage(s) of the invention may be administered via a liquid spray, such as via a plastic bottle atomizer. For topical administration to the eye, the bacteriophage(s) according to the invention can be administered as drops and gels. For urinary tract rinse/bladder irrigation, the bacteriophage(s) according to the invention can be administered as rinses in a suitable carrier such as sterile saline, acetic acid (e.g., 0.25% acetic acid solution), antibiotic (e.g., neomycin-polymyxin solution), or combination thereof.

[0155] Pharmaceutical compositions or nutraceutical compositions of the invention may also contain other adjuvants such as flavorings, colorings, anti-microbial agents, or preservatives. The invention also provides kits containing packaging and a bacteriophage(s) of the invention.

[0156] Dose and duration of therapy will depend on a variety of factors, including the patient age, patient weight, and tolerance of the phage. Bacteriophage may be administered to patients in need of the therapy provided by this invention by oral administration. Based on previous human experience in the former Soviet Union and Europe, a dose of phage between 10⁶ and 10¹¹ PFU will be suitable in most instances (Sulakvelidze and Kutter 2005). For example, the bacteriophage may be present in a composition in an amount between 10⁶ and 10¹² PFU. The bacteriophage may be present in a composition in an amount about 10⁶, 10⁷, 10⁸, 10⁹, 10¹⁰, 10¹¹, or 10¹² PFU. The bacteriophage may be present in a composition in an amount between 10⁶ and 10⁸, 10⁶ and 10⁹, 10⁶ and 10¹⁰, or 10⁷ and 10¹² PFU. The phage may be administered orally in, for example, mineral water, optionally with 1.0-3.0 grams of sodium bicarbonate added to reduce stomach acidity. Alternatively, sodium bicarbonate may be administered separately to the patient just prior to dosing with the phage. Phages also may be incorporated in a tablet or capsule which will enable transfer of phages through the stomach with no or little reduction of phage viability due to gastric acidity, and release of active phages in the small intestine (with potential additional protection against bile salts). The frequency of dosing will vary depending on how well the phage is tolerated by the patient and how effective a single versus multiple doses is at reducing pathogenic E. coli gastrointestinal colonization.

[0157] The dose of Deposited Bacteriophage and duration of therapy for a particular patient can be determined by the skilled clinician using standard pharmacological approaches in view of the above factors. The response to treatment may be monitored by, analysis of blood, fecal matters, or body fluid levels of pathogenic E. coli, or pathogenic E. coli levels in relevant tissues or monitoring disease state in the patient. The skilled clinician will adjust the dose and duration of therapy based on the response to treatment revealed by these measurements.

[0158] One of the major concerns about the use of phages in clinical settings is the possible development of bacterial resistance against them. However, as with antimicrobial resistance, the development of resistance to phages takes time. The successful use of phages in clinical settings will require continual monitoring for the development of resistance, and, when resistance appears, the substitution of other phages to which the bacterial mutants are not resistant. In general, phage preparations may be constructed by mixing several separately grown and well-characterized lytic phages, in order to (i) achieve the desired, broad target activity of the phage preparation, (ii) ensure that the preparation has stable lytic properties, and (iii) minimize the development of resistance against the preparation. The invention provides for a method of formulating phage preparations comprising of one or more of Deposited Bacteriophage to reduce the frequency of bacterial resistance against phages.

[0159] The invention also provides for a method for modulating an animal's microbiome by preventing colonization or reducing colonization by pathogenic E. coli comprising administration of an effective amount of a composition comprising at least one of the isolated bacteriophage ECML-1 (PTA-127245), ECML-10 (PTA-127246), ECML-123-2 (PTA-121408), ECML183-2 (PTA-127247), ECML-359 (PTA-121406), ECML-363 (PTA-121407), ECML-606-1 (PTA-127248), ECCR-664-1 (PTA-127249) deposited to the ATCC, said bacteriophage having lytic activity against pathogenic E. coli strains, and variants thereof, wherein said variants retain the phenotypic characteristics of said bacteriophage and wherein said bacteriophage and variants thereof have lytic activity against pathogenic E. coli strains. In this embodiment, the Deposited Bacteriophage may be used in combinations including two or more, three or more, four or more, five or more, six or more, or seven or more of the Deposited Bacteriophages. The composition may be a pharmaceutical composition or nutraceutical composition including dietary supplement, probiotic, and/or prebiotic. The composition may be formulated as a capsule, tablet, suppository, chewable composition, syrup, or gel. The capsule may be a gel capsule, preferably enteric coated gel capsule. In a method for modulating an animal's microbiome by preventing or reducing colonization by pathogenic E. coli. In animals, animal species may be alpacas, armadillos, capybaras, cats, chimpanzees, chinchillas, cattle, dogs, goats, gorillas, horses, humans, lemurs, llamas, mice, non-human primates, pigs, rats, sheep, shrews, and tapirs. In avian animals, avian species may be poultry (chickens, turkeys, geese, and ducks), wildlife, waterfowl, psittacine birds, and game birds. In humans, the patient may be an adult, infant, or child, for example, a child is less than 5 years of age. The pathogenic E. coli strain may be STEC, EHEC, EPEC, ETEC, EAEC, EIEC, DAEC, UPEC, MNEC, avian pathogenic E. coli, sepsis-associated E. coli, mammary pathogenic E. coli, endometrial pathogenic E. coli, necrotoxigenic E. coli, or a combination thereof.

[0160] In a method for modulating an animal's microbiome by reducing colonization by pathogenic E. coli bacteria strains the patient may be colonized by a pathogenic E. coli strain or strains. The bacteriophage may be present in the pharmaceutical composition or nutraceutical composition in an amount of 10⁶ and 10¹² PFU. The method may reduce pathogenic E. coli colonization of the gastrointestinal tract, vagina, urinary tract, skin, or a combination thereof.

[0161] The development of neutralizing antibodies against a specific phage is possible. However, the development of neutralizing antibodies may not pose a significant obstacle in the proposed clinical settings, because the kinetics of phage action is much faster than is the host production of neutralizing antibodies. For example, phages can be used for a few days (e.g., 1-14 days), sufficient to reduce bacterial colonization during the time when immunocompromised patients are most susceptible to the development of potentially fatal septicemia caused by pathogenic E. coli, but not long enough for phage-neutralizing antibodies to develop in sufficient concentrations to hinder the treatment efficacy. If the development of anti-phage antibodies is a problem, several strategies can be used to address this issue. For example, different combination of one or more of the Deposited Bacteriophages may be administered at different times during therapy. It will be appreciated that the amount of the present bacteriophages, required for use in treatment will vary not only with the particular carrier selected but also with the route of administration, the nature of the condition being treated and the age and condition of the patient. Ultimately the attendant health care provider may determine proper dosage.

### Food Preservation

[0162] In one embodiment, the invention contemplates a method for reducing the risk of foodborne illnesses or spoilage caused by the Targeted Bacteria, comprising contacting a food product or products intended for humans or animals with a microbial growth inhibiting effective amount of a bacteriophage composition comprising the Deposited Bacteriophage. The modes of contact include, but are not limited to, spraying, misting, or fogging the Deposited Bacteriophages composition on the food product(s), or by dipping or soaking the food product(s) in a solution containing a concentration of the Deposited Bacteriophages sufficiently high to inhibit the growth of Targeted Bacteria, or adding, injecting, or inserting the Deposited Bacteriophages into the food product(s) in a said concentration.

[0163] In another embodiment, the invention contemplates the application of the Deposited Bacteriophages composition to equipment associated with the processing of food product(s), such as cutting instruments, conveyor belts, and any other implements utilized in the production of food products, including the preparation, storage and packaging steps of food processing. The Deposited Bacteriophages can additionally be introduced into packaging materials used to contain food product(s), prior to or following transfer of the food product(s) to the packaging materials. Alternatively, the Deposited Bacteriophages can be useful in the local processing of food products located, for example, in the home or in a restaurant kitchen, using the same modes of contact as described supra.

[0164] In another embodiment of the invention, the Deposited Bacteriophages are added as a component of paper products, either during processing or after completion of processing of the paper products. Paper products to which the Deposited Bacteriophages may be added include, but are not limited to, paper towels, toilet paper, moist paper wipes. In a preferred embodiment of the invention, the Deposited Bacteriophages are added as a component of cleansing wipes. The Deposited Bacteriophages may be added in an aqueous state to a liquid-saturated paper product, or alternatively may be added in powder form, to dry paper products, or any combination thereof. In similar manner, the Deposited Bacteriophages may be incorporated into films such as those used for packaging foods, such as by impregnating or coating the film or plastic or paper containers or bags used for storing or transporting food products.

[0165] The methods of the invention further contemplate the application of the Deposited Bacteriophages to the floors, walls, ceilings, drains, conveyer belts, cutting surfaces, or other environmental surfaces in structures such as the industrial food processing, military, or home environments. In a particularly preferred embodiment of the invention, the Deposited Bacteriophages are applied to refrigerated devices used to store or transport food or food products, including but not limited to, home and industrial refrigerators, deli-meat and cheese counters, refrigerated trucks, and mobile food-service vehicles.

[0166] In a non-limiting embodiment of the invention, the Deposited Bacteriophages of the invention are useful in preventing the colonization of, or inhibiting the growth of, Targeted Bacteria on processed or unprocessed food products by infecting, lysing, or inactivating Targeted Bacteria present on said food product. Processed or unprocessed food products intended for humans in which the Deposited Bacteriophages are particularly useful in preventing the growth or colonization of Targeted Bacteria include, but are not limited to, poultry and beef (particularly ground poultry and beef), fresh vegetables exposed to Targeted Bacteria such as lettuce, spinach, green onions, and other fresh fruits and vegetables commonly grown out of doors in fields. Processed or unprocessed food products intended for animals in which the Deposited Bacteriophages are particularly useful include wet pet foods, moist pet foods, and dry pet foods intended for household pets, as well as feed intended for domesticated animals such as horses, cows, sheep, pigs, chickens, turkeys, and fish raised in farming or aquaculture environments.

[0167] The Deposited Bacteriophages can also be administered to potable and non-potable water sources to reduce or eliminate the presence of Targeted Bacteria.

[0168] Bacteriophage compositions of the invention may be provided in aqueous or non-aqueous embodiments for the preservation of food.

[0169] Aqueous embodiments of the Deposited Bacteriophages include aqueous compositions comprising, or alternatively consisting of, one of the Deposited Bacteriophages alone or in combination with other Deposited Bacteriophages, or with another bacteriophage or other bacteriophages. Aqueous embodiments of the Deposited Bacteriophages are available in solutions that include, but are not limited to, phosphate buffered saline, Luria-Bertani Broth, or water with the levels of chlorine less than 10 ppm.

[0170] Non-aqueous embodiments of the Deposited Bacteriophages include, but are not limited to, dried compositions comprising, or alternatively consisting of, the Deposited Bacteriophages alone or in combination with other bacteriophage(s). Freeze-dried and spray-dried compositions may also include soluble and/or insoluble carrier materials as, for example, processing aids.

[0171] The Deposited Bacteriophages can be administered at a concentration effective to prevent the initial colonization of foods with Targeted Bacteria, or to inhibit the growth or colonization of food or food products, as well as the equipment used to process or store food. In a non-limiting embodiment of the invention, the Deposited Bacteriophages typically administered at a growth inhibiting effective amount of a concentration of about 10⁷ to about 10¹¹ Plaque Forming Units (PFU)/mL. One of skill in the art is capable of ascertaining bacteriophage concentrations using widely known bacteriophage assay techniques (Adams 1959). The Deposited Bacteriophages at such concentrations may be applied at, for example, about 1-4 mL/500 cm² of food surface or 10⁶-10¹⁰ PFU/g food product.

### Food Processing Uses

[0172] The present invention provides a method for reducing the risk of growth of microorganisms on food products comprising contacting a food product with an effective amount of a composition comprising at least one of the Deposited Bacteriophage for reducing the risk of growth of pathogenic E. coli microorganisms on food products. Reducing the risk of growth of microorganisms on food products is intended to provide a food product that is devoid of or contains minimal numbers of viable microorganisms that could cause illness in humans or animals or spoilage of the food product prior to ingestion. The food product may be fruit juices, vegetable juices, produce (including fruits, vegetables, grains, and oats), wheat kernels, flour, seafood and selfish, poultry, beef, lamb, or pork.

[0173] Reducing the risk of growth of microorganisms on food products is intended to include but is not limited to the following mechanisms: (1) removal of attached microorganisms from the food products; (2) inhibition of attachment of microorganisms to the food products; (3) killing or inactivation of attached microorganisms on the food products; and (4) killing or inactivation of microorganisms which are not attached to the food product but which are present in liquids associated with the food products during processing; such as in chill tanks, or which are present on surfaces associated with food preparation, liquids remaining on such surfaces, such as countertops, cutting boards and sinks, and equipment used in food preparation and sanitization of the food.

[0174] The present invention has an important application in the food processing industry, as well as for home and institutional food preparation. The Deposited Bacteriophage compositions of the invention are readily available and the cost of carrying out the method of the present invention is not expensive as compared to some of the existing antimicrobial processes. Unlike existing treatments using, for example, trisodium phosphate or irradiation, the use of the Deposited Bacteriophage compositions of the invention does not alter the appearance, color, taste, or texture of the food product. Moreover, the Deposited Bacteriophage compositions of the invention are non-toxic. The Deposited Bacteriophage compositions may be readily applied to food processing equipment and food processing workspaces. For example, a composition comprising the Deposited Bacteriophage may be applied by spraying onto a surface or equipment used in food processing. The Deposited Bacteriophage compositions may be readily applied to food preparation equipment and food preparation workspaces, e.g., surfaces used in food preparation work.

[0175] The Deposited Bacteriophage composition is applied for a period of time sufficient to kill pathogenic E. coli bacteria present on the food product. It is important that the application time of the Deposited Bacteriophage compositions is for a sufficient time to result in significant reduction of the risk of growth of pathogenic E. coli on the food product.

[0176] The present invention also includes methods of contacting the Deposited Bacteriophage compositions of the invention with food products, including but not limited to, spraying or misting or fogging the compound on the food product, or by immersing the food product in a composition comprising at least one of the Deposited Bacteriophages of the invention.

[0177] The present invention is intended to encompass any method that contacts the Deposited Bacteriophage compositions of the invention with a food product by any direct means, including spraying, misting, fogging, dipping, or soaking. But the present invention also is intended to include contact of the Deposited Bacteriophage compositions of the invention with the food by indirect means, such as applying the Deposited Bacteriophage compositions of the invention to equipment or food product processing or preparation surfaces in which the food product is contacted during processing, preparation, storage, and/or packaging.

[0178] Any type of method of contact of the Deposited Bacteriophage compositions with the food product is preferred as long as it is capable of allowing a short application time while ensuring even and thorough coverage of the treatment area: A method that utilizes a cabinet that provides spraying or misting or fogging of the food product is useful in the present invention. Machinery for use in such cabinets on a processing line in a food processing plant are adaptable for reducing the application time to a minimum while still obtaining efficacious antimicrobial effects on the food.

[0179] The present method is useful, for example, in a poultry processing plant for treating post-chilled chickens that have been immersed in a chill bath of cold water. The chickens are removed from the chill bath and treated with the Deposited Bacteriophage compositions of the invention for an application time sufficient to result in significant reduction of the risk of growth of microorganisms on the chickens. The treated chickens are subsequently packaged without further washing or rinsing. However, the method optionally may include, if deemed necessary, at least one washing step of the chickens prior to packaging. The optional washing step may include spraying or misting the food product with water or immersing the food product in a container or tank of water.

[0180] Further, the method of the present invention can optionally include a determination step prior to contacting the food product with the Deposited Bacteriophage compositions of the invention to determine the presence of microorganisms on the food before treatment. Any conventional methods for rapidly determining the presence of microorganisms can be utilized as the determination step, which for example, includes PCR and immunoassays.

[0181] Further, the method of the present invention can optionally include a determination step to select the Deposited Bacteriophage compositions that are most effective in reducing or eliminating pathogenic E. coli in the food product. For example, pathogenic E. coli strains could be screened for their susceptibility to each of the Deposited Bacteriophages by the drop-on-lawn method, also known as the “spot test” method, essentially as described in (Adams 1959) once the testing results are available, the Deposited Bacteriophages most effective in lysing the targeted pathogenic E. coli strains could be selected and formulated into the Deposited Bacteriophage composition that is most effective in reducing or eliminating pathogenic E. coli in the food product.

[0182] Additionally, the method of the present invention optionally includes a step to determine the presence of the bacteriophage compositions of the invention on the surface of the food product after contact with the Deposited Bacteriophage compositions. This determination is performed immediately after the contacting step or after several washing steps. For example, the Deposited Bacteriophage compositions of the invention is extracted from the tissues of the food in a form suitable for high performance liquid chromatography (HPLC) analysis or PCR analysis or direct plating analysis.

[0183] The food processing industry, as well as home, restaurant, or institutional food preparation, needs more effective products and processes for the reduction of the risk of growth of a broad range of contaminating microorganisms on many different food products and/or surfaces that the food products and juices or liquids from the food come in contact. This is especially true for microorganisms which are attached to the surfaces of food. As a result of increasing numbers of illnesses caused by foodborne pathogenic microorganisms, the food processing industry now requires more effective processes for the removal and reduction of the risk of growth of a broader spectrum of microorganisms, and particularly for pathogenic microorganisms, such as pathogenic E. coli, which are known to cause serious human diseases because of food contamination. The present invention provides a composition comprising at least one Deposited Bacteriophages of the invention and methods of reducing the risk of growth of microorganisms on and in the food, as well as in liquids and on surfaces associated with food products and their preparation. This method of reducing the risk of growth of microorganisms is an important goal in reducing the risk of cross-contamination from infected food products; in removing attached microorganisms from food products; in inhibiting the attachment of microorganisms to the food products; and in reducing the risk of growth of microorganisms that remain attached to the food products. Further, the method of the present invention can easily be adapted for use in a food processing plant.

### Environmental Control

[0184] In another embodiment of the invention, the Deposited Bacteriophages are administered to environments to control the growth or viability of Targeted Bacteria. Environments in which the Deposited Bacteriophages are useful to control the growth or viability of Targeted Bacteria include, but are not limited to, abattoirs, meat processing facilities, feedlots, vegetable processing facilities, medical facilities (including hospitals, out-patient clinics, school and/or university infirmaries, and doctors' offices), military facilities, veterinary offices, animal husbandry facilities, public and private restrooms, and nursing and nursing home facilities. The invention further contemplates the use of the Deposited Bacteriophages for the battlefield decontamination of food stuffs, the environment, and personnel and equipment, both military and non-military.

[0185] The Deposited Bacteriophages are additionally useful alone or in combination with other bacteriophage(s) and/or other compounds (e.g., exopolysaccharide-degrading enzymes encoded by the phage genomes), for reducing the risk of formation of biofilms, or controlling the growth of biofilms, in various environments. Aqueous embodiments of the Deposited Bacteriophages are available in solutions that include, but are not limited to, phosphate buffered saline, Luria-Bertani Broth, or chlorine-free water (water that contains less than 10 ppm chlorine). In a particularly preferred embodiment, the Deposited Bacteriophages are used to control biofilm formation and growth in municipal water systems, industrial water systems, and personal water systems, as well as biofilms present in refrigerated environments.

[0186] The modes of administration include, but are not limited to, spraying, moping, hosing, and any other reasonable means of dispersing aqueous or non-aqueous bacteriophage compositions, in an amount sufficiently high to inhibit the growth or viability of Targeted Bacteria. In a non-limiting embodiment of the invention, the Deposited Bacteriophages are useful in reducing the risk of growth or reducing viability of Targeted Bacteria by infecting, lysing, or inactivating Targeted Bacteria present in said environment. Administration of the Deposited Bacteriophages composition includes application to the floors, walls, countertops, ceilings, drains or any other environmental surface.

[0187] Bacteriophage compositions of the invention are available in aqueous or non-aqueous embodiments discussed earlier for Food Preservation applications.

[0188] In another embodiment of the invention, the Deposited Bacteriophages are added as a component of paper products, either during processing or after completion of processing of the paper products. Paper products to which the Deposited Bacteriophages may be added include, but are not limited to, paper towels, toilet paper, and moist paper wipes. In a preferred embodiment of the invention, the Deposited Bacteriophages are added as a component of cleansing wipes; it may be added in an aqueous state to a liquid-saturated paper product, or alternatively may be added in powder form such as a spray-dried preparation, to dry paper products, or any combination thereof.

[0189] The Deposited Bacteriophages can be administered at a concentration effective to inhibit the growth or viability of Targeted Bacteria in a particular environment. In a non-limiting embodiment of the invention, the Deposited Bacteriophages are administered at a concentration of about 10⁷ to 10¹² PFU/mL. In another non-limiting embodiment of the invention, the Deposited Bacteriophages are administered at a concentration of about 10-100 mL/500 cm 2 of environmental surface. One of skill in the art is capable of ascertaining bacteriophage concentrations using widely known bacteriophage assay techniques (Adams 1959).

### Nutraceutical Uses (Dietary Supplements, Prebiotics, or Probiotics)

[0190] The Deposited Bacteriophages may be formulated into nutraceutical compositions, which could include one or more of the Deposited Bacteriophages and be in the form of dietary supplements, prebiotics, or probiotics.

[0191] In addition to one or more of the Deposited Bacteriophages, the nutraceutical compositions may also include one or more probiotic bacterial strains, preferably Lactobacillus species, preferably L. acidophilus, L. rhamnosus, L. gasseri, L. reuteri, L. bulgaricus, L. plantarum, L. johnsonii, L. paracasei, L. casei, L. salivarius, or L. lactis, Bifidobacterium species, preferably B. bifidum, B. longum, B. breve, B. infantis, B. lactis, or B. adolescentis, Streptococcus thermophilus, Bacillus cerus, Bacillus subtilis, Enterococcus faecalis, Enterococcus faecium, or a combination thereof.

[0192] In addition to one or more of the Deposited Bacteriophages, the nutraceutical compositions may also include one or more probiotic yeast strains, preferably Saccharomyces cerevisiae, Saccharomyces boulardii, Saccharomyces cerevisiae var. boulardii, Issatchenkia occidentalis, Lachancea thermotolerans, Metschnikowia ziziphicola, Torulaspora delbrueckii, or a combination thereof.

[0193] In addition to one or more of the Deposited Bacteriophages, the nutraceutical compositions may also include one or more of other ingredients that enhance prophylactic or therapeutic effect of deposited bacteriophages, including but not limited to proanthocyanidin, cranberry juice extract, D-mannose, vitamins (preferably vitamin C), acetic acid, and celery extract.

[0194] In addition to one or more of the Deposited Bacteriophages, the nutraceutical compositions may also include one or more aforementioned probiotic bacterial strains and yeast strains.

[0195] The nutraceutical compositions may be administered to a pet, agriculturally important animal, or human patient, wherein the Deposited Bacteriophages lyse the Targeted Bacteria. This lysis of the Targeted Bacteria may lead to a better microflora balance and confer a health benefit on the recipient. Combination of the Deposited Bacteriophages and aforementioned probiotic bacterial strains and/or yeast strains may provide enhanced health benefits. For example, lysis of the Targeted Bacteria by the Deposited Bacteriophages may reduce diarrhea caused by pathogenic E. coli, whereas Saccharomyces boulardii may concurrently help alleviate other general digestion problems, e.g., irritable bowel syndrome. In another example, lysis of the Targeted Bacteria by the Deposited Bacteriophages may mitigate, reduce the risk of, or treat urinary tract infections by reducing UPEC levels in the urinary tract, whereas cranberry juice extract and/or D-mannose may concurrently help reduce the risk of or mitigate UPEC adherence to surface along the urinary tract thereby enhancing lytic effect of the Deposited Bacteriophages.

### Reduction of the Risk of, Mitigation, or Treatment of Infection or Prevention or Treatment of Colonization

[0196] In another embodiment, the invention contemplates a method for the reduction of the risk of, mitigation or treatment of illnesses caused by the Targeted Bacteria, comprising contacting a microbial growth inhibiting effective amount of a bacteriophage composition comprising the Deposited Bacteriophages with a site or sites of infection of a host mammal infected with Targeted Bacteria.

[0197] At the time bacteriophages were discovered, with the age of antibiotics still in the future, bacteriophages were considered to be a potentially powerful cure for bacterial infections, and they were therapeutically utilized throughout the world during the pre-antibiotic era. The use of phages in humans was found to be very safe; however, phage therapy did not always work and, with the advent of antibiotics that were effective against a broad spectrum of pathogenic bacteria, it gradually fell out of favor in the United States and Western Europe. Several factors, including the lack of a broad understanding of phage biology, the “Soviet Taint,” and inadequate diagnostic bacteriology techniques, contributed to the failure of some of the early phage therapy studies and to the associated decline of interest in phage therapy in the West. Reviewed in more detail in (Sulakvelidze and Kutter 2005). At the same time, phage therapy continued to be utilized in the former Soviet Union and Eastern Europe, where phage therapy still is being used to treat a wide range of bacterial diseases ranging from intestinal infections to septicemia. Comprehensive information about human and veterinary applications of bacteriophages has been recently reviewed by several investigators. See (Alisky, Iczkowski et al. 1998), (Sulakvelidze and Kutter 2005).

[0198] The infected mammalian host may be a human host or animal host. In particular, the host may be a bovine, poultry, or porcine host. Reducing the risk of developing the infection by Targeted Bacteria, or treatment of infected persons or animals, is particularly preferred in immuno-compromised persons, pregnant females, and newborns and infants, who maybe at an elevated risk of infection by Targeted Bacteria. The modes of contact include, but are not limited to, spraying, or misting the bacteriophage composition on the infected mammalian host, by injecting at a site or sites of infection a pharmaceutically acceptable composition containing a concentration of the Deposited Bacteriophages sufficiently high to inhibit the growth of Targeted Bacteria, or by ingesting a solution containing a concentration of the Deposited Bacteriophages sufficiently high to inhibit the growth of Targeted Bacteria. Additional routes of administration include but are not limited to oral, rectal, topical, ophthalmic, buccal, intravenous, otic, nasal, vaginal, inhalation, and intrapleural.

[0199] In another nonlimiting embodiment of the invention, the Deposited Bacteriophages are useful for preparing bacterial vaccines or bacterins that eliminate or reduce colonization of the Targeted Bacteria in, and/or their being shed by various agriculturally important animals. One example of a practical application for that type of vaccine is in the poultry-raising industry, where its administration may significantly reduce colonization of poultry with the Targeted Bacteria; thus, improving public safety by reducing contamination of poultry with the Targeted Bacteria.

[0200] In yet another nonlimiting embodiment of the invention, the Deposited Bacteriophages are useful for preparing bacterial vaccines or bacterins that eliminate or reduce colonization of the Targeted Bacteria in, and/or their being shed by, various agriculturally important animals. One example of a practical application for that type of vaccine or bacterin is in the poultry-raising industry, where its administration may significantly reduce colonization of poultry with the Targeted Bacteria; thus, improving safety of the animals and enhancing their growth dynamics (e.g., improving feed conversion ratios in birds) by reducing or eliminating colonization of poultry with the Targeted Bacteria.

[0201] Bacteriophage compositions of the invention are available in aqueous or non-aqueous embodiments discussed earlier for Food Preservation applications.

[0202] The Deposited Bacteriophages can be administered at a concentration effective to inhibit the growth or viability of Targeted Bacteria in the infected host. In a non-limiting embodiment of the invention, the Deposited Bacteriophages are administered at a concentration of about 10⁷ to 10¹¹ PFU/mL. In another non-limiting embodiment of the invention, the Deposited Bacteriophages are administered at a concentration of about 1-4 mL/500 cm² of food surface or 10⁶-10¹⁰ PFU/g food product. One of skill in the art is capable of ascertaining bacteriophage concentrations using widely known bacteriophage assay techniques (Adams 1959).

[0203] Depending on the severity of peculiarities of the infection, the Deposited Bacteriophages can be administered to animals (including humans) (i) orally, in tablet or liquid formulation (10⁶-10¹² PFU/dose), (ii) rectally, (iii) locally (skin, eye, ear, nasal mucosa, etc.), in tampons, rinses and creams, (iv) as aerosols or intrapleural injections, (v) rinses (e.g., for bladder irrigation), and (vi) intravenously.

### Use of Bacteriophage Derivatives

[0204] Derivatives, such as polypeptides, including but not limited to bacteriophage lytic enzymes, encoded by the bacteriophage or the bacteriophage progeny are used for applications designed to reduce the risk of growth of Targeted Bacteria through cell wall lysis. In this context, lytic polypeptides are useful for reducing the risk of growth of Targeted Bacteria on processed and unprocessed food products, as well as equipment used for the processing of said food products.

[0205] In another preferred embodiment of the invention, bacteriophage derivatives are useful for the treatment of one or more infections in a mammal, including humans, by administering their therapeutically effective amounts to the patient. This method is useful for the treatment of infections of the gastrointestinal system. Similarly, this method is useful in a prophylactic setting for reducing the risk of infection by Targeted Bacteria in pregnant mammals, including humans. This method of treatment is further useful for reducing the risk of other disorders, or infections caused by Targeted Bacteria, such as acute bloody or non-bloody diarrhea, sometimes associated with hemolytic-uremic syndrome.

[0206] Another nonlimiting embodiment of the invention is that the bacteriophage derivatives such as lysins will be useful for preparing bacterial vaccines or bacterins that eliminate or reduce colonization of the Targeted Bacteria in, and/or their being shed by various agriculturally important animals. One example of a practical application for that type of vaccine is in the cattle-raising industry, where administration of such vaccines/bacterins may significantly reduce colonization of cattle with the Targeted Bacteria; thus, improving public safety by reducing contamination of beef with the Targeted Bacteria.

### Detection Systems

[0207] The Deposited Bacteriophage, its progeny, recombinant bacteriophage, or derivatives of the above are useful in methods of screening environmental samples (including food products and food processing equipment) and clinical specimens for the presence of viable cells of Targeted Bacteria. For example, in one such system, recombinant bacteriophage containing a reporter system such as, for example, a luciferase reporter system is applied to the sample and analyzed at some time point in the future for the activation of the reporter molecule. The activation of the reporter molecule is indicative of the presence of viable cells of Targeted Bacteria.

[0208] The Deposited Bacteriophage, their progeny, recombinant bacteriophage, or derivatives such as lytic enzymes are useful in methods of screening environmental samples including food products and food processing equipment and clinical specimens for the presence of viable cells of Targeted Bacteria, by monitoring and measuring bacterial metabolism products such as bacterial adenosine kinase (AK) or adenosine triphosphate (ATP) released as a result of specific lysis of Targeted Bacteria. For example, when the released ATP is incubated with a luciferin/luciferase mixture, a rapid flash of peak light emission occurs within less than a second, followed by a steady glow lasting for several hours. By measuring the luminescence, it is possible to obtain a quantitative estimate of the number of bacterial cells in a sample. Although the basic approach involved in such detection-based assays is well-established, the existing assays have shortcomings that hinder their wide acceptance. For example, the various reagents that have been used to lyse bacteria and release their ATP have broad-specificity; therefore, ATP is released from all susceptible bacterial and eukaryotic cells present in the sample, which can cause false-positive readings. In this context, the original Deposited Bacteriophage, its progeny, recombinant bacteriophage, or derivatives such as lytic enzymes will specifically lyse Targeted Bacteria without affecting any other prokaryotic or eukaryotic cells that may be present in the sample, thus providing means for accurately and specifically identifying and detecting Targeted Bacteria.

### Epidemiological Typing

[0209] The Deposited Bacteriophage, and/or their progeny and derivatives may be further useful as a tool for the epidemiological typing of Targeted Bacteria. For example, one of skill in the art can use the Deposited Bacteriophages of the invention to screen a panel of Targeted Bacteria isolates to aid in the taxonomic identification of the Targeted Bacteria, by determining which isolates yield a positive lytic reaction to the Deposited bacteriophage. For example, see (van der Mee-Marquet, Loessner et al. 1997).

### Preparation of Vaccines or Bacterins

[0210] The Deposited Bacteriophage, and/or its progeny and derivatives, also may be valuable for preparing bacterial lysates to be used as vaccines or bacterins. The immunogenicity of such vaccines or bacterins may be superior to that of so-called dead cell vaccines because phage-mediated lysis is a more effective and gentler approach for exposing protective antigens of bacteria than are approaches used to prepare the latter vaccines. For example, methods commonly used to inactivate bacterial pathogens for dead-cell vaccines, including but not limited to heat treatment, UV-irradiation, and chemical treatment, may deleteriously affect a vaccine's effectiveness by reducing the antigenicity of relevant immunological epitopes (Holt, Enright et al. 1990), (Melamed, Leitner et al. 1991), (Lauvau, Vijh et al. 2001). The presence of viable bacteriophage may also serve as an additional efficacy-enhancing factor, increasing the effectiveness of a phage lysate via their antibacterial effect on the Targeted Bacteria.

### Use of Recombinant Bacteriophage

[0211] In one embodiment of the invention, homologous recombination techniques are used to introduce sequences encoding alternative proteins, non-functional proteins, or non-coding sequences into the bacteriophage DNA sequence. Such techniques are useful to remove or “knock-out” undesired traits of the Deposited Bacteriophage, or alternatively to introduce different traits. In a particularly preferred embodiment of the invention, homologous recombination is used to “knock-out” ORFs encoding proteins that maybe involved in a lysogenic cycle of the bacteriophage.

[0212] In another embodiment of the invention, homologous recombination is used to add, or knock-out genes involved in burst size. For example, homologous recombination is used to introduce alternative bacteriophage genes which delay the burst event or increase the phage burst size.

[0213] In another embodiment of the invention, recombinant bacteriophage harboring reporter system(s) is generated for various practical applications. One example of possible application of such system is species identification/confirmation of Targeted Bacteria as bacterial diagnostics. Another possible application is the detection of the presence of viable cells of Targeted Bacteria to which the Deposited Bacteriophages have specificity. Following the techniques of Loessner et al., for example, one of skill in the art can generate recombinant reporter bacteriophage (Loessner, Rees et al. 1996). For example, the Vibrio harveyi luxAB gene may be introduced into the bacteriophage DNA sequence using techniques such as homologous recombination. An ideal target for the introduction of the luxAB gene is immediately downstream and in frame with an ORF encoding bacteriophage capsid protein, thereby creating a sequence encoding a fusion protein. The preferable location of introduction of the luxAB gene sequence is particularly before any sequence encoding a transcriptional terminator downstream of the ORF encoding a capsid protein. Other bacteriophage ORF sequences which may function as useful sources of luxAB gene-fusions include gene sequences encoding tail-sheath proteins, or any other late gene region sequences encoding phage head or tail proteins. The resulting recombinant bacteriophage may be used with methods of the invention to detect the presence of viable cells of Targeted Bacteria.

[0214] In addition to the Vibrio harveyi luxAB gene, other reporter genes which are useful for the generation of reporter bacteriophage include, but are not limited to, the firefly luciferase gene.

[0215] The invention further contemplates the introduction of one or more of the above-described recombinant events. For example, a recombinant bacteriophage of the invention may harbor one or more reporter gene(s) as well as lack one or more genes associated with certain undesirable biological functions of the bacteriophage.

[0216] The above description of various illustrated embodiments of the invention is not intended to be exhaustive or to limit the invention to the precise form disclosed. While specific embodiments of, and examples for, the invention are described herein for illustrative purposes, various equivalent modifications are possible within the scope of the invention, as those skilled in the relevant art will recognize. The invention may be practiced in ways other than those particularly described in the foregoing description and examples. The teachings provided herein of the invention can be applied to other purposes, other than the examples described below.

[0217] All publications (e.g., Non-Patent Literature), patents, patent application publications, and patent applications mentioned in this specification are indicative of the level of skill of those skilled in the art to which this invention pertains. All such publications (e.g., Non-Patent Literature), patents, patent application publications, and patent applications are herein incorporated by reference to the same extent as if each individual publication, patent, patent application publication, or patent application was specifically and individually indicated to be incorporated by reference.

### EXAMPLES

[0218] The invention will be described below on the basis of special embodiments, which, however, are in no way to be taken to mean a restriction of the general inventive concept. These examples and methods are specific embodiments; however, the present invention is not limited to these examples and methods. It is known to the person skilled in the art that the invention can be carried out in the same manner by modifying the examples and methods described and/or by replacing individual examples or methods or parts of examples or methods by alternative examples or methods or alternative parts of examples or methods.

### Example 1—Deposited Bacteriophages Isolation

[0219] ECML-1, ECML-10, ECML-123-2, ECML183-2, ECML-359, ECML-363, ECML-606-1, ECCR-664-1 bacteriophages were isolated from various environmental sources using lysis of the Targeted Bacteria to form plaques in bacterial lawns as a means of detecting the presence of bacteriophage having lytic specificity for the Targeted Bacteria. Plaques were harvested, diluted, and re-plated on bacterial lawns through a process of serial enrichment until a single bacteriophage species, or monophage, was obtained. This process allowed for selection of highly specific, lytic bacteriophage. The isolates obtained using the technique recited supra may be cultured using the techniques as set forth herein. The bacteriophage was deposited with the ATCC. The ATCC Deposit No. of the bacteriophages are shown in parenthesis adjacent to the bacteriophage: ECML-1 (PTA-127245), ECML-10 (PTA-127246), ECML-123-2 (PTA-121408), ECML183-2 (PTA-127247), ECML-359 (PTA-121406), ECML-363 (PTA-121407), ECML-606-1 (PTA-127248), ECCR-664-1 (PTA-127249).

### Example 2—Deposited Bacteriophages Concentration Determination

[0220] Concentration of the Deposited Bacteriophages may be determined using techniques known in the art (Adams 1959). When a single phage particle encounters a permissive bacterium, it will lyse it with the concomitant release of newly formed phage particles. When phages are mixed with host cells and poured in a layer of soft agar on the surface of a nutrient agar plate supporting bacterial growth, the cells will resume growth. In areas where no phages are present the bacteria will grow to stationary phase, forming a smooth opaque layer or lawn in the overlay. In areas where phages are present, phage progeny from each infected bacterium will infect neighboring bacteria, resulting in a growing zone of lysis full of liberated phage particles which eventually becomes visible to the naked eye as a plaque in the otherwise smooth bacterial lawn.

[0221] These plaques can be counted, and their number is commonly used for expressing phage titer in plaque-forming units or PFU. Using this approach, concentration of the Deposited Bacteriophages may be determined. Briefly: (1) Various dilutions of the Deposited Bacteriophages preparation are prepared; for example, by mixing 0.1 ml of phage sample with 9.9 ml of sterile Mueller Hinton broth. The samples are gently but thoroughly mixed. 0.5 ml of this mixture (which is a 10⁻² dilution of the original sample) is mixed with 4.5 ml of sterile Mueller Hinton broth (10⁻³ dilution). Several 10-fold dilutions are prepared in a similar fashion; (2) the contents of the tubes (1 ml of various dilutions) are transferred into sterile 10 ml culture tubes and 0.1 ml of host bacterial culture are added. The sample is mixed gently before proceeding immediately to the next step; (3) 3-5 ml of warm (45-50° C.) 0.7% LB agar (top agar) are added. The sample is mixed quickly and very gently. Then, the entire contents of the culture tube are poured onto a plate containing solidified LB—or technically equivalent—agar (bottom agar). The plates are slid in circles a few times on the bench top immediately after pouring; (4) after sitting at room temperature for 10 min to allow the top agar to harden, the plates are inverted and placed into a 37° C. incubator and incubated overnight; (5) the next morning, the number of plaques on the plate with 30-300 individual well-spaced plaques are counted and the titer calculated and expressed as PFU/mL of the starting sample.

### Example 3—Production of the Deposited Bacteriophages

[0222] The Deposited Bacteriophages are produced using a culture system. More specifically, strain of the host Targeted Bacteria or other closely related bacterial species on which the bacteriophage can propagate is cultured in batch culture, followed by inoculation of the bacteriophage at the pre-determined multiplicity of infection (MOI; ratio of phage vs. host bacteria). Following incubation and bacterial lysis, the bacteriophage is harvested and purified and/or concentrated to yield phage progeny suitable for the uses enumerated herein. Purification and concentration procedures included variously processing through filtration system(s), centrifugation (including continuous-flow centrifugation) or other known bacteriophage purification and concentration techniques (Adams 1959). The deposited bacteriophages produced as described above could be used as aqueous solution, or further processed to remove moisture and create a dry powder formulation, e.g., in the presence of a suitable excipient such as, for example, maltodextrin.

[0223] The invention provides compositions comprising active viral particles of the bacteriophage capable of lysing strains of Targeted Bacteria. The concentration of bacteriophage is determined using phage titration protocols as outlined in Example 2. The final concentration of the bacteriophage is adjusted by concentration, if a more concentrated phage composition is desired, via filtration, centrifugation, or other means, or by dilution, if a less concentrated phage composition is desired, with water or buffer to yield a phage titer of 10⁶ to 10¹² PFU/mL, preferably 10⁹ to 10¹² PFU/mL. The resulting bacteriophage compositions are generally stored at 2-8° C. in dark; alternatively, preparations can be freeze-dried or spray-dried for storage, or can be encapsulated and stabilized with protein, lipid, polysaccharide, or mixtures thereof. Upon reconstitution, the phage titer can be verified using phage titration protocols and host bacteria. One of skill in the art is capable of determining bacteriophage titers using widely known bacteriophage assay techniques (Adams 1959).

### Example 4—Application of the Deposited Bacteriophages for Preservation of Food Products

[0224] The bacteriophage produced using the methods of the present invention may be dispersed in an appropriate aqueous solution or dried powder and applied to the surface of food products. Alternatively, the bacteriophage may be included with a cheese culture or other microbially active foodstuff prior to or during processing.

### Example 5—Application of the Deposited Bacteriophages for Reducing the Risk of Foodborne Illness

[0225] The bacteriophage produced using the methods of the present invention may be given to animals (including humans) in an appropriate aqueous solution or enteric coated gel capsule to enhance gut resilience against pathogenic E. coli bacteria and reduce the severity or risk of development of, foodborne illness (including diarrhea, cramps, fever, and pain or other discomfort such as bloating) due to consumption of foods that may be contaminated with pathogenic E. coli.

### Example 6 Isolation of the Bacteriophage DNA

[0226] Bacteriophage DNA, a derivative of the bacteriophage, can be used for various applications such as for preparing DNA-based vaccines as well as for analytical purposes, e.g., for identifying the bacteriophage such as genome sequencing or RFLP profile determination and comparison. For example, phage DNA can be isolated using the standard phenol extraction technique, or a suitable commercial kit such as the Qiagen Plasmid Miniprep kit (Valencia, CA) or the Lambda Mini Kit (Qiagen, Inc.; Valencia, CA).

### Example 7—Restriction Fragment Length Polymorphism (RFLP) Profile

[0227] RFLP can be used to identify the Deposited Bacteriophages or its progeny. The progeny will have a substantially equivalent RFLP DNA profile as the RFLP DNA profile of the original bacteriophage, as defined by (Tenover, Arbeit et al. 1995). A reference RFLP profile of the Deposited Bacteriophages are shown in FIG. 1. DNA was isolated from the bacteriophage using Qiagen Plasmid Miniprep or Midiprep kits (Valencia, CA) according to the manufacturer's directions. The DNA can be quantitated by measuring absorbance at 260 nm. Approximately 0.5-1 mg of DNA could be digested with an appropriate restriction enzyme, and RFLP profile determined on an agarose gel after staining with ethidium bromide. RFLP patterns of the Deposited Bacteriophages after EcoRV digest are shown in FIG. 1.

### Example 8—Genome Analysis and Average Nucleotide Identity of the E. coli Phages

[0228] Full genome sequencing and sequence analysis could be used to identify the Deposited Bacteriophages or its progeny. The progeny will have ANI≥95% to be considered “Same Species” (including “Substantially Equivalent” to the Deposited Bacteriophages, or its “Progeny” or “Derivative”) as defined by Olm (Olm 2017) and Jain et al. (Jain, Rodriguez et al. 2018). All Deposited Bacteriophages have been sequenced. The GenBank accession numbers and other pertinent (genomic) information for the Deposited Bacteriophages are given in Table 2.

[0229] FIG. 2 shows a Force Graph activity visualization of the Deposited Phages against 738 E. coli strains, wherein the Force Graph was created using Intralytix's proprietary PhageSelector™ program. The green nodes represent the eight Deposited Bacteriophages. The blue nodes are collections of E. coli strains. Lines connecting green nodes to blue nodes indicate a Deposited Bacteriophage which can lyse the strains belonging to a node at a given concentration. Blue nodes that are larger in size and cluster towards the center of the figure denote that a larger number of strains are being lysed by multiple phages (i.e., redundant lytic spectrum coverage); while smaller nodes which cluster near the edges of the figure show a smaller number of strains that are susceptible to fewer monophages.

### Example 9—Lytic Specificity of the Deposited Bacteriophages

[0230] Seven hundred thirty-eight (738) E. coli strains were examined for their susceptibility to each of the eight Deposited Bacteriophages by the drop-on-lawn method, also known as the “spot test” method, essentially as described by (Adams 1959). Summary of the testing results is presented in Table 7. Of the eight deposited bacteriophages, ECML-363 has the broadest target range when tested against the entire collection of 738 E. coli strains (kills about 58% of all strains), while ECML-606-1 only targets about 6% of these strains (Table 7). Noteworthy, these data are for all E. coli strains in the Intralytix's bacterial strain collection, including both pathogenic and non-pathogenic E. coli. The efficacy of the Deposited Bacteriophages is considerably better against pathogenic E. coli. Just to give a few examples: (1) ECML-1 phage alone kills 100% of the eight K88 pathogenic E. coli in this collection; (2) Two of the Deposited Phages (ECCR-664-1 and ECML-183-2) combined kill 96% of 214 pathogenic STEC strains (Table 8).

[0231] In Tables 7 and 8 below, “Unique” means a number of unique kills by a particular phage (e.g., that the particular Deposited Phage has killed E. coli strains not killed by another phage). In Tables 7 and 8 below, “Kills” means a number of targeted strains of E. coli that were killed.

TABLE 7
Activity of the Deposited Bacteriophages against 738 E. coli strains

| Rank | Phage | Kills | Resistant | Unique | Cocktail* |
|---|---|---|---|---|---|
| 1 | ECML-363 | 426 | 283 | 426 | 426 (58%) |
| 2 | ECML-1 | 212 | 469 | 107 | 533 (72%) |
| 3 | ECML-10 | 261 | 420 | 50 | 583 (79%) |
| 4 | ECML-359 | 409 | 301 | 32 | 615 (83%) |
| 5 | ECCR-664-1 | 82 | 45 | 14 | 629 (85%) |
| 6 | ECML-183-2 | 40 | 13 | 4 | 633 (86%) |
| 7 | ECML-123-2 | 242 | 458 | 2 | 635 (86%) |
| 8 | ECML-606-1 | 44 | 57 | 0 | 635 |

TABLE 8
Activity of the Deposited Bacteriophages
against 214 pathogenic STEC strains

| Rank | Phage | Kills | Resistant | Unique | Cocktail* |
|---|---|---|---|---|---|
| 1 | ECML-359 | 179 | 28 | 179 | 179 (84%) |
| 2 | ECCR-664-1 | 75 | 14 | 25 | 204 (95%) |
| 3 | ECML-183-2 | 32 | 10 | 3 | 207 (97%) |
| 4 | ECML-363 | 177 | 30 | 1 | 208 (97%) |
| 5 | ECML-1 | 10 | 173 | 0 | 209 (98%) |
| 6 | ECML-10 | 69 | 114 | 0 | 209 |
| 7 | ECML-123-2 | 46 | 155 | 0 | 209 |
| 8 | ECML-606-1 | 6 | 37 | 0 | 209 |

*Cocktail - mixture of two or more individual phages. Each row shows number of E. coli strains lysed by cocktail of phages containing all phages through that row inclusive. For example, in Table 8, line 3 (Rank 3) shows cocktail that contains 3 phages (ECML-359, ECCR-664-1, and ECML-183-2) lysing 207 of the 214 pathogenic STEC strains.

### Example 10—Detection of Targeted Bacteria in Various Samples

[0232] The bacteriophage or its derivative, such as lytic enzyme, produced using the methods of the present invention is used to specifically lyse Targeted Bacteria without affecting any other prokaryotic or eukaryotic cells that may be present in the sample; thus, specifically eliciting their release of measurable bacterial products such as AK or ATP. Briefly: (1) Samples to be analyzed are obtained and suspended in appropriate buffer, (2) The Deposited Bacteriophages are added to the suspensions, as a result of which the Targeted Bacteria cells present in the samples are lysed and their ATP is released, (3) A luciferin+luciferase preparation is added to the mixtures, and (5) The mixtures' luminescence is measured within 60 sec, and the results are displayed on a handheld luminometer. It may be possible to establish a correlation between the luminometer readings and the number of Targeted Bacteria cells lysed (in general, the average amount of ATP per bacterial cell is 0.5-1.0 fg; precise correlation between the luminometer readings and the number of Targeted Bacteria cells should be experimentally established). If Targeted Bacteria cells are not present in the food samples analyzed, bacterial lysis and ATP-release will not occur. Detection of pathogenic E. coli strain in a various sample (including food samples, environmental samples, and clinical specimens) employing the deposited bacteriophages or derivatives thereof, as described above, for example, is also contemplated by this invention.

### Example 11—Preparing Vaccines and Bacterins

[0233] One example of utilizing bacteriophages to prepare vaccines and bacterins is to use the lytic Deposited Bacteriophages to lyse specific strains of the Targeted Bacteria, which will yield bacterial lysates containing minimally affected immunological epitopes of the bacteria. The phage may be removed from the final vaccine/bacterin preparation. Alternatively, it may be retained unaltered in the preparation because its lytic activity against Targeted Bacteria that may be present in the mammalian organism being vaccinated may increase the preparation's efficacy. In one preferred embodiment of the present invention: (i) the most prevalent, problematic strains of the Targeted Bacteria are chosen so that the vaccine/bacterin contains the immunological epitopes that are most relevant for protecting against the infection, and (ii) the bacteriophage is kept unaltered in the final vaccine/bacterin, at levels ranging from 10⁶-10¹² PFU/mL.

[0234] Bacteriophage-based vaccines and bacterins also may be prepared by using derivatives of the Deposited Bacteriophages to lyse the Targeted Bacteria. An example of the general methodology can be briefly outlined from a study of a Helicobacter pylori bacterin (Panthel, Jechlinger et al. 2003). The authors used E. coli-H. pylori shuttle plasmid pHel2 and lysis gene e of bacteriophage (pX174 to construct H. pylori lysis plasmid pHPC38, which they introduced into H. pylori strain P79. At a pre-determined time, the authors triggered e gene-expression to elicit bacterial lysis, and they found that the lysate/bacterin protected BALB/c mice against H. pylori infection. Vaccination using a vaccine comprising bacterins produced by lysis of pathogenic E. coli species or strain(s) employing the deposited bacteriophages or derivatives thereof is also contemplated by this invention. Production of the vaccine as well as vaccination using such a vaccine may be performed by methods known to a person of ordinary skill in the art.

### Example 12—Application of the Deposited Bacteriophages for Reducing the Risk of, Mitigating, or Treating Gastrointestinal Diseases Caused by Pathogenic E. coli in Humans

[0235] One or more of the Deposited Bacteriophage may be included in a pharmaceutical formulation that could be given to human either at risk of exposure to pathogenic E. coli and before the onset of clinical symptoms (i.e., reducing the risk of disease) or after they develop clinical symptoms—e.g., diarrhea—that are associated with pathogenic E. coli infections (i.e., treatment of disease). Such pharmaceutical formulation maybe administered orally to humans, with the oral dosage form formulated such that the Deposited Bacteriophage(s) are released into the intestine after passing through the stomach, to protect phage from the acidic environment (typical pH of 1.5 to 3.5) of the stomach. One example of such formulation would be enteric coated gel caps, preferably in size “0” or “00,” with the capsule capacity of 408-816 mg or 546-1,092 mg, respectively.

[0236] One or more of the Deposited Bacteriophage may be embedded in nanosized polymeric microgel particles including a cross-linked polymer network of polyionic segments and neutral segments as described in Vinogradov (Vinogradov 2006). The microgel particles will have diameters of about 1 μm to about 4 μm, suitable sized for phagocytosis by macrophages. Preferably, non-mammalian carbohydrates such as mannose, chitosan, and β-glucan may be incorporated into the microgel particles to induce phagocytosis of the microgel particles by macrophages. The microgel particles may be given to animals (including humans) to enhance resilience against pathogenic E. coli bacteria and to reduce the risk and/or severity of illness. For example, the phage-containing microgel particles may be given to humans by oral, intravenous, or intradermal or intraparenchymal injection of an appropriate phage-containing microgel preparation to reduce the risk of, mitigate, and/or treat pathogenic E. coli infections caused by consumption of foods or drinking water that may be contaminated with pathogenic E. coli.

### Example 13—Application of the Deposited Bacteriophages for Reducing the Risk of, Mitigating, or Treating UTI Infections Caused by Pathogenic E. coli in Humans

[0237] One or more of the Deposited Bacteriophage may be given to humans orally to reduce the risk of, prevent, or treat UTI caused by pathogenic E. coli, including UPEC. Alternative treatment regimens may include administering one or more of the Deposited Bacteriophages to humans by intravenous (i.v.) injection, intramuscular (i.m.) injection, intraperitoneal (i.p.) injection, via irrigation of the urinary tract, and/or by using suprapubic trocar and/or transurethral catheters, or by any combination of these approaches.

### Example 14—Application of the Deposited Bacteriophages for Reducing the Risk of, Mitigating, or Treating Diseases Caused by Pathogenic E. coli in Non-Human Animals

[0238] One or more of the Deposited Bacteriophage may be given to non-human animals to enhance resilience against pathogenic E. coli bacteria and to reduce the risk and/or severity of illness. For example, phage preparation containing one or more of the deposited bacteriophages can be given to one or more food animals (any species commonly recognized as livestock including, but not limited to, poultry, cattle, swine, and sheep) to either reduce the risk of, mitigate, or treat respiratory and systemic diseases caused by pathogenic E. coli, including aerosacculitis, perihepatitis, polyserositis, pericarditis, egg peritonitis, salphingitis, coligranuloma, omphalitis, cellulitis, and osteomyelitis/arthritis, septicemia and (diseases commonly referred as avian colibacillosis). In this one example, live poultry includes chickens, turkeys, ducks, and other avian species. Also, in this example, pathogenic E. coli are various APEC serotypes, including O1, O2 (including O2:K2, which is one of the most common serotypes among APEC worldwide), and O78 (and especially O78:K80) which accounts for more than 80% of the illness (Dho-Moulin and Fairbrother 1999), (Rodriguez-Siek, Giddings et al. 2005), (Ebrahimi-Nik, Bassami et al. 2018). In one embodiment, one or more of the Deposited Bacteriophage produced according to paragraph may be given to live poultry by mixing with their drinking water or feed, to reduce the risk of APEC-associated illness or to treat colibacillosis.

### PUBLICATIONS, PATENTS AND PATENT APPLICATIONS

[0239] All publications, patents and patent applications are herein incorporated by reference in their entirety to the same extent as if each individual publication, patent or patent application was specifically and individually indicated to be incorporated by reference in its entirety.

[0240] Those skilled in the art will recognize or be able to ascertain using no more than routine experimentation, many equivalents to the specific embodiments of the invention described herein. Such equivalents are intended to be encompassed by the following claims.

### REFERENCES

[0241] ADDIN EN.REFLIST Abuladze, T., M. Li, M. Y. Menetrez, T. Dean, A. Senecal and A. Sulakvelidze (2008). “Bacteriophages reduce experimental contamination of hard surfaces, tomato, spinach, broccoli, and ground beef by Escherichia coli O157:H7.” Appl Environ Microbiol 74(20): 6230-6238.
[0242] Adams, M. H. (1959). Enumeration of bacteriophage particles. Bacteriophages. London, Interscience Publishers, Ltd.: 27-34.
[0243] Adams, M. H. (1959). Methods of study bacterial viruses. Bacteriophages. London, Interscience Publishers, Ltd.: 443-522.
[0244] Alisky, J., K. Iczkowski, A. Rapoport and N. Troitsky (1998). “Bacteriophages show promise as antimicrobial agents.” J Infect 36(1): 5-15.
[0245] Aymerich, T., P. A. Picouet and J. M. Monfort (2008). “Decontamination technologies for meat products.” Meat Sci 78(1-2): 114-129.
[0246] Behrsing, J., S. Winkler, P. Franz and R. Premier (2000). “Efficacy of chlorine for inactivation of Escherichia coli on vegetables.” Postharvest Biol Technol 19: 187-192.
[0247] Belanger, L., A. Garenaux, J. Harel, M. Boulianne, E. Nadeau and C. M. Dozois (2011). “Escherichia coli from animal reservoirs as a potential source of human extraintestinal pathogenic E. coli.” FEMS Immunol Med Microbiol 62(1): 1-10.
[0248] Bell, B. P., M. Goldoft, P. M. Griffin, M. A. Davis, D. C. Gordon, P. I. Tarr, C. A. Bartleson, J. H. Lewis, T. J. Barrett, J. G. Wells and et al. (1994). “A multistate outbreak of Escherichia coli O157:H7-associated bloody diarrhea and hemolytic uremic syndrome from hamburgers. The Washington experience.” JAMA 272(17): 1349-1353.
[0249] Beutin, L. (1999). “Escherichia coli as a pathogen in dogs and cats.” Vet Res 30(2-3): 285-298.
[0250] Buzby, J. C. (2001). “Children and microbial foodborne illness.” Food Review 24: 32-37.
[0251] Buzby, J. C. and T. Roberts (1997). “Economic costs and trade impacts of microbial foodborne illness.” World Health Stat Q 50(1-2): 57-66.
[0252] Buzby, J. C. and T. Roberts (2009). “The economics of enteric infections: human foodborne disease costs.” Gastroenterology 136(6): 1851-1862.
[0253] Carter, C. D., A. Parks, T. Abuladze, M. Li, J. Woolston, J. Magnone, A. Senecal, A. M. Kropinski and A. Sulakvelidze (2012). “Bacteriophage cocktail significantly reduces Escherichia coli O157: H7 contamination of lettuce and beef, but does not protect against recontamination.” Bacteriophage 2(3): 178-185.
[0254] Davidson, P. M. and M. A. Harrison (2002). “Resistance and adaptation to food antimicrobials, sanitizers, and other process controls.” Food Technology 56(11): 69-78.
[0255] Dho-Moulin, M. and J. M. Fairbrother (1999). “Avian pathogenic Escherichia coli (APEC).” Vet Res 30(2-3): 299-316.
[0256] Dziva, F. and M. P. Stevens (2008). “Colibacillosis in poultry: unravelling the molecular basis of virulence of avian pathogenic Escherichia coli in their natural hosts.” Avian Pathol 37(4): 355-366.
[0257] Ebrahimi-Nik, H., M. R. Bassami, M. Mohri, M. Rad and M. I. Khan (2018). “Bacterial ghost of avian pathogenic E. coli (APEC) serotype O78:K80 as a homologous vaccine against avian colibacillosis.” PLoS One 13(3): e0194888.
[0258] Etcheverría, A. I., P. M. A. Lucchesi, A. Kruger, A. B. Bentancor and N. L. Padola (2016). Escherichia coli in animals. Escherichia coli in the Americas. A. Torres, Springer, Cham. Fairbrother, J. M., E. Nadeau and C. L. Gyles (2005). “Escherichia coli in postweaning diarrhea in pigs: an update on bacterial types, pathogenesis, and prevention strategies.” Anim Health Res Rev 6(1): 17-39.
[0259] Frenzen, P. D., A. Drake, F. J. Angulo and G. Emerging Infections Program FoodNet Working (2005). “Economic cost of illness due to Escherichia coli O157 infections in the United States.” J Food Prot 68(12): 2623-2630.
[0260] Ghunaim, H., M. A. Abu-Madi and S. Kariyawasam (2014). “Advances in vaccination against avian pathogenic Escherichia coli respiratory disease: potentials and limitations.” Vet Microbiol 172(1-2): 13-22.
[0261] Greig, D. J., F. M. Gulland, W. A. Smith, P. A. Conrad, C. L. Field, M. Fleetwood, J. T. Harvey, H. S. Ip, S. Jang, A. Packham, E. Wheeler and A. J. Hall (2014). “Surveillance for zoonotic and selected pathogens in harbor seals Phoca vitulina from central California.” Dis Aquat Organ 111(2): 93-106.
[0262] Guabiraba, R. and C. Schouler (2015). “Avian colibacillosis: still many black holes.” FEMS Microbiol Lett 362(15): fnv118.
[0263] Holt, M. E., M. R. Enright and T. J. Alexander (1990). “Immunisation of pigs with killed cultures of Streptococcus suis type 2.” Res Vet Sci 48(1): 23-27.
[0264] Jain, C., R. L. Rodriguez, A. M. Phillippy, K. T. Konstantinidis and S. Alum (2018). “High throughput ANI analysis of 90K prokaryotic genomes reveals clear species boundaries.” Nat Commun 9(1): 5114.
[0265] Kaper, J. B., J. P. Nataro and H. L. Mobley (2004). “Pathogenic Escherichia coli.” Nat Rev Microbiol 2(2): 123-140.
[0266] Kathayat, D., D. Lokesh, S. Ranjit and G. Rajashekara (2021). “Avian pathogenic Escherichia coli (APEC): an overview of virulence and pathogenesis factors, zoonotic potential, and control strategies.” Pathogens 10(4).
[0267] Kim, K. S. (2016). “Human meningitis-associated Escherichia coli.” EcoSal Plus 7(1).
[0268] Koren, S., B. P. Walenz, K. Berlin, J. R. Miller, N. H. Bergman and A. M. Phillippy (2017). “Canu: scalable and accurate long-read assembly via adaptive k-mer weighting and repeat separation.” Genome Res 27(5): 722-736.
[0269] Kutter, E. and A. Sulakvelidze (2005). Bacteriophages: Biology and Application. Boca Raton, FL, CRC Press.
[0270] Lauvau, G., S. Vijh, P. Kong, T. Horng, K. Kerksiek, N. Serbina, R. A. Tuma and E. G. Pamer (2001). “Priming of memory but not effector CD8 T cells by a killed bacterial vaccine.” Science 294(5547): 1735-1739.
[0271] Loessner, M. J., C. E. Rees, G. S. Stewart and S. Scherer (1996). “Construction of luciferase reporter bacteriophage A511::luxAB for rapid and sensitive detection of viable Listeria cells.” Appl Environ Microbiol 62(4): 1133-1140.
[0272] Luppi, A. (2017). “Swine enteric colibacillosis: diagnosis, therapy and antimicrobial resistance.” Porcine Health Management 3(1): 16.
[0273] McGrath, S. and D. van Sinderen (2007). Bacteriophage: Genetics and Molecular Biology, Caister Academic Press.
[0274] Melamed, D., G. Leitner and E. D. Heller (1991). “A vaccine against avian colibacillosis based on ultrasonic inactivation of Escherichia coli.” Avian Dis 35(1): 17-22.
[0275] Merril, C. R., B. Biswas, R. Carlton, N. C. Jensen, G. J. Creed, S. Zullo and S. Adhya (1996). “Long-circulating bacteriophage as antibacterial agents.” Proc Natl Acad Sci USA 93(8): 3188-3192.
[0276] Mokgatla, R. M., V. S. Brozel and P. A. Gouws (1998). “Isolation of Salmonella resistant to hypochlorous acid from a poultry abattoir.” Lett Appl Microbiol 27(6): 379-382.
[0277] Moye, Z. D., J. Woolston and A. Sulakvelidze (2018). “Bacteriophage Applications for Food Production and Processing.” Viruses 10(4).
[0278] Olm, M. (2017). Are these microbes the “same”? microBEnet: the microbiology of the Built Environment network: microbe.net/2017/2002/2015/are-these-microbes-the-same/.
[0279] Olm, M. R., C. T. Brown, B. Brooks and J. F. Banfield (2017). “dRep: a tool for fast and accurate genomic comparisons that enables improved genome recovery from metagenomes through de-replication.” ISME J 11(12): 2864-2868.
[0280] Panthel, K., W. Jechlinger, A. Matis, M. Rohde, M. Szostak, W. Lubitz and R. Haas (2003). “Generation of Helicobacter pylori ghosts by PhiX protein E-mediated inactivation and their evaluation as vaccine candidates.” Infect Immun 71(1): 109-116.
[0281] Pennington, H. (2010). “Escherichia coli O157.” Lancet 376(9750): 1428-1435.
[0282] Prudent, V., G. Demarre, E. Vazeille, M. Wery, N. Quenech'Du, A. Ravet, J. Dauverd-Girault, E. van Dijk, M. A. Bringer, M. Descrimes, N. Barnich, S. Rimsky, A. Morillon and O. Espeli (2021). “The Crohn's disease-related bacterial strain LF82 assembles biofilm-like communities to protect itself from phagolysosomal attack.” Commun Biol 4(1): 627.
[0283] Rangel, J. M., P. H. Sparling, C. Crowe, P. M. Griffin and D. L. Swerdlow (2005). “Epidemiology of Escherichia coli O157:H7 outbreaks, United States, 1982-2002.” Emerg Infect Dis 11(4): 603-609.
[0284] Rodriguez-Siek, K. E., C. W. Giddings, C. Doetkott, T. J. Johnson and L. K. Nolan (2005). “Characterizing the APEC pathotype.” Vet Res 36(2): 241-256.
[0285] Scallan, E., R. M. Hoekstra, F. J. Angulo, R. V. Tauxe, M. A. Widdowson, S. L. Roy, J. L. Jones and P. M. Griffin (2011). “Foodborne illness acquired in the United States—major pathogens.” Emerg Infect Dis 17(1): 7-15.

[0286] Simoes, R. R., L. Poirel, P. M. Da Costa and P. Nordmann (2010). “Seagulls and beaches as reservoirs for multidrug-resistant Escherichia coli.” Emerg Infect Dis 16(1): 110-112.
[0287] Stenutz, R., A. Weintraub and G. Widmalm (2006). “The structures of Escherichia coli O-polysaccharide antigens.” FEMS Microbiol Rev 30(3): 382-403.
[0288] Sulakvelidze, A. (2011). “Safety by nature: potential bacteriophage applications.” Microbe 6(3): 122-126.
[0289] Sulakvelidze, A. and P. Barrow (2005). Phage therapy in animals and agribusiness. Bacteriophages: Biology and Applications. E. Kutter and A. Sulakvelidze. Boca Raton, FL, CRC Press: 335-380.
[0290] Sulakvelidze, A. and E. Kutter (2005). Bacteriophage therapy in humans. Bacteriophages: Biology and Application. E. Kutter and A. Sulakvelidze. Boca Raton, FL, CRC Press: 381-436.
[0291] Summers, W. C. (1999). Félix d'Herelle and the origins of molecular biology. New Haven, CT, Yale Univ Press.
[0292] Suttle, C. A. (2005). “Viruses in the sea.” Nature 437(7057): 356-361.
[0293] Suttle, C. A. (2007). “Marine viruses—major players in the global ecosystem.” Nat Rev Microbiol 5(10): 801-812.
[0294] Tenover, F. C., R. D. Arbeit, R. V. Goering, P. A. Mickelsen, B. E. Murray, D. H. Persing and B. Swaminathan (1995). “Interpreting chromosomal DNA restriction patterns produced by pulsed-field gel electrophoresis: criteria for bacterial strain typing.” J Clin Microbiol 33(9): 2233-2239.
[0295] Terlizzi, M. E., G. Gribaudo and M. E. Maffei (2017). “UroPathogenic Escherichia coli (UPEC) infections: virulence factors, bladder responses, antibiotic, and non-antibiotic antimicrobial strategies.” Front Microbiol 8: 1566.
[0296] van der Mee-Marquet, N., M. Loessner and A. Audurier (1997). “Evaluation of seven experimental phages for inclusion in the international phage set for the epidemiological typing of Listeria monocytogenes.” Appl Environ Microbiol 63(9): 3374-3377.
[0297] van Elk, C. E., M. W. van Dep Bildt, B. E. Martina, A. D. Osterhaus and T. Kuiken (2007). “Escherichia coli septicemia associated with lack of maternally acquired immunity in a bottlenose dolphin calf.” Vet Pathol 44(1): 88-92.
[0298] Vinogradov, S. V. (2006). “Colloidal microgels in drug delivery applications.” Curr Pharm Des 12(36): 4703-4712.
[0299] Walker, B. J., T. Abeel, T. Shea, M. Priest, A. Abouelliel, S. Sakthikumar, C. A. Cuomo, Q. Zeng, J. Wortman, S. K. Young and A. M. Earl (2014). “Pilon: an integrated tool for comprehensive microbial variant detection and genome assembly improvement.” PLoS One 9(11): e112963.
[0300] Wheeler, T. L., S. D. Shackelford and M. Koohmaraie (1999). “Trained sensory panel and consumer evaluation of the effects of gamma irradiation on palatability of vacuum-packaged frozen ground beef patties.” J. Anim Sci. 77(12): 3219-3224.
[0301] Yoon, S. H., S. M. Ha, J. Lim, S. Kwon and J. Chun (2017). “A large-scale evaluation of algorithms to calculate average nucleotide identity.” Antonie Van Leeuwenhoek 110(10): 1281-1286.

The application's sequence listing, which the Patent Office published only in electronic form, follows.

SEQUENCE LISTING (10 sequences)

SEQ ID NO: 1 - DNA, 167029 bp, Escherichia coli phage ECML-363
  source 1..167029: mol_type = genomic DNA
ttaggccgcaagggccttcatagttttagcgatttgggaaacttcatcatcacttaaagagttgcgatatccgatgaagtcggaaacaatacggaatttcttggtaaactcagcaaccattttatcactgttttttgaagcattatttgataatacatcaaaaagattagttactgtccagatatcatgaccgatggtatcttttccaccattaaaatatacaccgcgcaatgaactaactacattagcgagtcgtgtatattcttcagaaacttcatctgtactgaagtacttcatcataaaatctagctcaggatacttgataattttatcaatatatcgttgagctgaacttgaataacctacatacttatcataatctacatcatcaaaagcatctacatataaatcacgcaaagcttcaaaaatacattggcactgaccgagttcttttacctttttctgtaaaagcggacgaataacataaaattcattaatgccaataagattagccatacgaatcaaaatattcatagatggatgacaaagtgatgtagtaccatccatagagaaaatatcagaacgatgcatatacgctacataaccagtaatttcatctgcttctgacgtaagtgtaaatagttcctctttttcccatcgcccatctttaatttcaaatttaaatgctgtagcagctttaggacgaggagctttacttttaactacctttggaatatagcttttaactaaagtttcaatttctgacagataatgaatgttaacttcatcactttcaaacattgccataatatcaggtagtaaatcaatctgcgattctacttccggattaataaacagaagacgctcattgtgatgaatattcaaagtgttattaaattcactatcatctagcgcatgtgctaatccacggacaatattaacacgatttttaatattatcaataacgatattaatttttgttgtattaataccaaacagacgataacttgatgcaacggctgaagtttcatgactttgcttaatgcgtttcagtcgagggtcaagatttacttcatacaccacgcctgcattacataacttactgtcaggttcaaacatgctctgcatctttttatatgacagatttttagtcgtgaatttgactgaattactaatcatataatctcgagcagaataccccatcttcatcaattcacgatatgtgtgacggggagatgtagattctttaaatcgttttacatcttcattaaatgctttctcactaagctctttaactcgttcaataatatttttacgagtacgatcatccaatgaaagagcttcacgtgatggagcaatatcaagtgaacccattggaaacttaatgtaattcacttcattgcgaatgcttagccagttacggtctctaataacaccatcgataggataaacaataccgccatagatagcatataatccaccacgatcaggccagtatctttctggatttacaccgtaataatcatcaaaatccggaaaataatcaatttcgcggtcaagaccattaataatagccaaatctttgaacggtcgcatgatataagaaacttcataagcaaagtttctaaagtctttttcttcaactggaactacgatttcaataccagttttatcatctggacccatttcttttacgaatgtaggtttaatctgtgggccatcaccatccatgtaagctacataaccacgaatttcacctttatgatacgaagtaatactaaacgtatcagtataactaaacggagatttagaacctaaaccaaatccgccaatgaaatcgttagattcagccttagatgaactgaagtatgaattatacaaaccaggagaattatcatcaccctgaatatcaaaatcactcatacccggaccaaaatctcggcaaacaaatcgcggatctaatcgtcctggaacttgaatgataaatttttcaggatttccattgagagcatgggcatcaatcatgttggtaatcaattcacggactactgcgcgaatcttgtttgtatacaaatcagatgacagaattttgaatactttaggagatgctgtgatgctaaatgcctttgatttagaaccattaccaagaattgtttctttttcagtggtgataatcataatttcctcattaattcatattgcgtttaataacttcagcaacttctagtagttcgtctttagttgcggtgtcggattgaattttatctctaatatctttaaagcggtttttaaattcttcggcttctcccatatcgaaaaagcgttgaatgattctatattctcgatgaactgctttatcaaaaagttctaaatttactttatatgatttcattccaatatcctcatttgcccaattaattataccacatccttgtggtaaagtaaactactggctcatccattctttacgaaggtcagcattatctcccatgagcatttcaaaaagctctttccagttctcaggaagtttaacaacatcatatactggattttgaatcatctcacgatattcagatttttccaaagagccaagtcccttaatataacggatgctatgtttaggtagagcatctttagcactctcatattcagcgactgtataaaaccatttttgttttttaccgacctgagcgatgattacaggagttttgacaaagcgaattcgtccttgctcaaacaattctggccaattactaaaaaatccgagcagagaaggataaatgcttcctagaccatcatggtcagcatcagtcataatagcaatattatgataattcaagttttcagctttttcacctagaactaaacccgtgattgcgcaaatatcaaacagttctttgtttttaagcatatcagcatatgacataccccaactgttgagaactttaccacgcaatggataaccaccatgaagttctttatcacgaacatcaataagatatccgatagcagaatcaccctcagtcaagaaaagagtagtgtcagcatctttaccacaaagattcgctttgatatgtttatgaaccttagctttagaagcctttttagctgctttagtttctgctgctttctctgccgccaatttacgagccaaagcagcttcaataatcggcattagaattgcttcattatttagaatagcgcgtgaaatctttttagcatcaagctgaatatgactacgaatttcgccaaatggagaagtcaaacgctctttagtttgagaatcaaatcgcatgtttttcatatcacgaacaaacataacgatagtcaaacattctttaacgcgtgctttagttacatcaattttgaatttacgtttgatttgtggaataaggtcttcacaaatatcatccatgacacagtcaatgtgatggccaccattcttagtgtgaatgttattcacgtaagttaattggcgaaaaccatcaggtgaacgaccaaccgcaatagaacaattttcttgttcttgaacaatagcatgctcatcatattggcgtgcatatttcttaaaattaccctgaacctttttaccattaaaggtaaattgaatatcaggataaacgacagcaagtgtctggagacgatccagtgtaatgtcaagataaacctgagacagctcattagtttcaaatgacataaaatcaggaatgaaagtaacacgagttcctttccattttccaggaatagtttcccaggatttattttccataccatttgaacaacgaactacaatattattttgaccatcgccagtttcaccgacaaacatcacagaaaaaatgtttgtcaaactagaaccaacaccattcataccaccggtgacgcgttctttatcatcaccgaagttaccacctgcttttggaatagtccaggcagcaacaggaccaggaatttcttcaccggtaggtgttttaaccatcgcttgtggaataccgcgaccgttatcttcaactgttacctgattatttttaatggtaacattaattttattcgcgaatttaaacttagtacgaataccttcatctactgagttatcgataatttcatcaataagcttaacaagaccaggtacatactgaacactttcccatttaccaaacagaaagcgctcatgcatttcattagcagaagagccaatatacatgccgctacgctttttgatatgttcaatatcgctcagaattttaatttcattcttaatcatcacttatcctcgtttggtttcgggaatattatactccggcaatcataaagctaaaggcccgaaggccttttatttaaaacgaatagttgaatccttaaagaacaacccagaacatactgttccttctactttctgcccagtaggtccaatagcacgaaatccagtatgttggaaatcattttcagagcaaccgaaccaattatatccagtgatttcaatattcgtaaaaccactcgatgataaaattttagttgcattatcagcatcagtacatcctactaaagatactgctaatactaatgctgcaatagaacgattaatatatttcatagttttcacttaaatttaatggcttgaaggagactaataattctcaaacggcttctttcatctttaactgtaaaagaaagagggtcgccagatttcatagtgatagtgcattcaaaatcaaaatcttcaggaacttcttcgaagaagtcaaattcttcatcataaattagaacttcactccgcagactgtgaagaatttttccagcatttctgctagttgctgtactaatcattgtaacattatgacctttcatatcttcaacgataaattcgcttgtagatattacggcattaatagaaccattcctattactagcagaaagtagatatttcttttcttcaccttcgcgaacacgatatttcttaccgattttaaacataatcaccctttaagtaaatcgtaaaaaccgccattcacatgcttaggagcagaaggccgacgagtagacaaacgatgacatttagggcaaacatcattttctcgttcagaaatctttttaattttttcatattcatgcccgcaatcttcggattggcatttataatcatacattggcataattattccttaaagtgtgctttcaacatctgatacaaagaccatgcctgttcattattttcaatagtaactttcatgaccgggaattctgtgaaatcttctatttgttcttgctcttcctgctcttgttcttcagcagcctggtagggattttcaacttcatcaaagaacacagcttcactcgttgaaagccagataaaatcttcatccaaaatatctttaccagaagataacgccaattttccactagatgtcacaagtttagtaggacgaccaagatagtcaatatctgtaactctaaaaggttccataccaagacgtcgtgcataaattccgttttcagtatggtccttgataaaatcttcttgagcttgtttatttttaaattgataccatttattaacttcaaatttaatagccattaataagtttccttccaataagttgtaccatcttcagtaatttcgcgaaacacaccataaattggttgtttatcaccaactttttcgtacacataaaccgaagtcaagtgaataaacttattagtatgttccttttgaactactacaagatttggatcaaataatacatcttcaaattcgtcattagtgcaattctgaacaattttacgtttcattacaatttcctcattaattgaacagtggaacgatgcgtttcagaagagtagcagcacctttagcgaattttacatcatgaaaaacagtttcttcttccgttacaacacgagctttaatgttttcacaatcccaatttttgcgaacaatcttcaaaagctgcagtaaatctttacattcagcaatatcgataacacatccacgagaatcttccattatcgcacgataaccgtaagccataccataatcgttgaaagattgctcgatgataattaagttttccattttattctccaagttattttctgtatcagtagttgatattgatatagtaccataatcaactactgatgtatatagttttatgaaaaaaatttaaactttatgcacagcgagctttgctatagtgtttaatccagctttcaggaatgactttgtatgttcctaaaaataccgcgttgtacagcttaacaccgtcttctacccactgatcggtaatgtatgcgcacatagcacgagtacggtgtttttgaacaaccccttcctcatcttcagtaaattcgaattcataaggagcaacgaacttaatagcctgaccgagtttccacttaaagtctacacctacatgcgaagtatcaatcgtttcaattcctttagcaggaacagctttcaaaaacgcagattcaagaaatttcgcacgaacatagccaaactgaggtttagactttccgtctttaggaatgatacgcacttttacttcagaatcttcatctttaacgccgtgtttaagctgaatgcttacaatttcgaccaattttcctgctgctttagaacgggatttatcagatacacgagcaatttcaccaatattaataatcatagttatctctcacttgttaaaaagattttatactccacaggaccattatactctgatcccaagagtttgtaaactattaattcaaaatagctaccactgcactacgaggtactacgctaaaatcacctgcatgaacaacgttcagaagttcaacaccatcttcaatccattggtctgttacccaaccacagaccgaaataaatggagtcttgatagctaccgcacgagttaaaaggtcagtaggatcgcattcttgaaagaggatgaactctgcttcaaagactatagttttaattacttcatcattatctaagcgatgtgctcgaatcacgtaagctttatttttatcataccagttactttttgaaaagcttttaaccacaaactcaccttcaccaaaaacactagtcaatgctttataacccaaatttagttcagttgttttaatttcagtttcaactagtttgtaggttttgccgatttcaatagcggtagtcatagtaggttccttaatttccagtggtttaacagggcatacataagtgcttacaacatcaaaatcaatcagtttagctaccggatttggtatgtattcaggattataattaaatttcataattatctcatttcaataaaatctacaagttcagcatgggatttacggaacattacttgatgcccaccaataataacttggtcatctggtacttcgtatacagcaagataaaatcctttcgaagataattcttcacgctcttctcgtgtgaaccatctcatcatatcatattcgctagcaaaagcaaaatgataaagagctataaaccatccgggaatatgatattctactccaacataatctttcttgaacttagtattaattacgatattagcatttttaactaatagtttatcttcgtgtggtaaaggaattcttttattattatcgctatgatgcataaaattaggtctgtcataacctacgtgtaatagccactcttcgctccatgaatctattatactcctgtacggcgttatttgaacacaaagatttcgacgtattgttatagcatcttcataatcaagaatactaaacgatgattcaacacgataaattttcattttattatcctcagtagctatggtgttataataccacaactaaccgaggaagtaaacaactttttatcgttttgttggaagagatagaggatcgcactcttcctctgatggagcgtcttcaagacccatagcataccgcaaagcatacttcatcatcaggatgtctttcgcacagtcatgaatagaatcatgtgcaacgaatccatctaaagttccctttggaagaggacaagtggtcatatcacgaacaagtagaagtgcttcaattctggtacgaatatcacgctgattccagaatttacacggttctaacttaaatgtatcaagctcattctcggaaacgccattaagacgttgaatatcacgaatgagatcgactaaaattggaaaatcaaacgacattccacggcaccaaccctgagatttccaaggatcgatattatgcgcattgatgtaatcattgaattttgcaataccatcaatagtgcttacatcttcatctgacggtgcaatattttttcgagcttcaggggattgattcttccaccattcgatagtgcttttagtaaaaagacgatgtcctttttggctttttaaatcaaatttgattttaatgccacgtgaaactaattcatcgaatgtttcaacgacttctggattagggtcaaaagcaattacagctaaatcaataacagctgccttttcgccgcttcccattgtttcaaaatctataataaaatcaaacattaaattttccttgctaaatcgcgaatttgacctacagtatagtcttgaatataaactttattaataggctcatcaataaattttgccatagattcaatgtctttttgtatctcttcaagactgtatactatctttgaagctttttcgcgaatagtaatattttcaggacccggattttcttcaatgacagctttaacatttgccataagagatttaaactgataccaacttaattcaatcattaataatcgccttataaagatggctaatttcgcctaaaacataatcactgattgtaacagttttcacttcaccacaaaagaattctaacgcaattaaatctcgttcaatttcttctaattgaagcctcaacttactagattcaatttttacatttctacgatttttactataagctatttcataaatttcgctcactttatcctgaagaagataaaactgatctttagttatttccacgaatagcttcctcaaatttaattagtaatttacagacactttcatctaatgtaattactgtatctgtattactatgatatgattgtttttcaattcgtttaattgctaatatagtatcacttataagataaagcttatgaaggagctcagctcctgttaccataacatcgagattatcttgcttattagtatgcttccttataccatctattagacgatttaaatattttgaattgatgttaatcatatagcctcacacataaaacacatcataacgaccacgtgttacaccaacataaagaagctgctgagctagttcagcatctgcataatgaatacaaggcgtataaatgaaagcacggtctacagacataccctgagctttatggaatgttgatgcaggaagtgctttcactttactaaactgtgatttagcatcccaaaaatcactccacggagcttttccgcctttattccaatttttataagtttctgccgttttacctaaaaacaggttaaacttatatagctcttcatcagatgaaattattttaatcttttcacgataatattcatcatcgccgtaagtttctactgttaaatcccaatgacgaattaagtattctccaggaacaccacgagctttaacaaacgtcgatgtatactctgcttctataatacgaactaattgtccattattaaaaataatttctgatacaggctttccatcaattttatatgttttaattaacggttcttgcattacaataatttcaccgacaataaagtctttatcagtttcaaaaatctttttacgaataatgctatttaacttgtcaacagatttattcgtaaatgccattacgcgattttcaaacaaatcatctagagatttgacgattgaaaaataatttactataaaatcgcgtaaagcggtatcaccagtaaatccacgtactccatgcccgtcaacaattttatcataaatccacttaccgttacgaacgtcagtagctacatcaataataggagcattactgcgtttaacttcagtaagttcacactgataaaaatctttgtgtgtaaagaatggactgatataagcagtattttctcctggatcaacaggtctaatttgcttattatcccctattccaattatagtacaccaaggtggaatagttgaaagcagaattttaaatagctttctatcatacattgacacttcatcgcagattaataccctgcatttagctaaatctggtacttccttctgttcaaaaagaacattttcttcatatgttaccgggttaattttaagaatgctgtgaatagtactcgcttctttccccgacagttttgaaagaatctttttagctgcatgtgtaggagctgccaaaatgataccagtttcgcccgtagatattaaagcttcaatgatgaacttagtaagagtagtcttaccagtaccagcaggtccattaatagttacatgatgtttcttttctttaatagccctcataacgatgttaaaggcatttttctgaccttcggtcaaatcatcaaatgtcatcgtaaattccctgcaattggtatactaacaatacgcccagtatctaaaattcgccgatataatctttgtgtgtctacatcaggcttaacgtgtttaacttctattttattaaaccaaaacttgcgtggagtttcaactaatcttggaattcccatacctaaagctagtcgatactgctctttaagagtggtaaatactctatcagcaatctccctttcaaaaaatacagcaggacgatgttcatcaagaggaacaggcaccgcaaatccatctttatctctatacactatcgcatatacataaaccatattatcctcggataagtttaaaaattgaacaatttagcgggtatcctcttttcagtttaagtttatcaataaaagacaagttttgataccgctctacaccttgaataattttatcacacatatcatattgcatttctgcttctgacaactttttcacaattttccaatccgagcctttaagaagaacgttcagtttaacaacttcagcgccttctgctatgcgagaaccatcaatacgagctttaagtgctataatcgttagcttaatgtcagaggtctgttttgatttagaaagctgagaaatgtgttcaattcgattttcacgttttttctgtatagctttaatttgattataagtctttttgattttagcccatttcttttcatctaaatttagtttatgaacttttttcgcagatgaacggccaattcgcaaagcaaataaatcacgcttttcaatcaactcttctaaagtataatcagaacgaaatgtattatactttttctttactgcaataacattccctttaatgtatccaatgttattatcaaaacgttctaatgataatttctctccttcaatacgattatcaaaaggttctcctgaataggcacaaactttttgatctaaaatgttcttaatgtaattgaagtctaagttaaaatctttagaacgtctttttgcagatgcctgagtgtgctctaaacgacgtttaattttacgaatttgattattagacagtttcatatttttctcacatcttacggacgattgactactatactataacatttttaccttagcttgtaaacaactttatgtaaaaatgctttaaaactttcatggtataatgaatctaagtccttccattatagattaaatccttcaaaatcaagagtatagatagtgtatgttgaatactttttatactcgtatctatccgcaattctaaatacacttccagctggtatcattacttcttgttcatctgaaactaattccatattacgatagcgatggctatccggaaacttaaaactcggactatattctttacaacgtaaagcttttatagcatactcctggaaattaaacaccataggagctttgaattcaaaaataacttgtgtgttgtattctaatccagaagcaaaatgtagagctatatttttatcatatgaagctgatactactttatcaaatgtaataatatcaattccttgatttaacacttgcttagtctcgactggaacacctctccaaagaggtttatcgtttggttccaaacgagatttgattatttcatttaaccaagtatggtcatctggtttgttggtaatacaatgaattaaaagttcaatttcagataaattaaacccttcagaaagtaattcttcacgaatagaagcacgcaccgatgcatccattgattttattttaaaatcttttagttgcattactgagtatttcattcaactacctcaatatcataaactttaaatgttccaaatgaatcgtgtaatttttcttttgaaatagaagttattctatactttccaattggaatcatccattcttgttcacgcacaatcatcattaagttatcagtacgctctgaatctagcccaccagtatcttcatacgtgtacttaaactcagtattaggagaagaaagtataatatcgctgatatggtcagaataattaaaagctttatcagtttttaagcgaaatattatttcagtgaaatactcaacataagaaaaaccacatgctgtgtgcaaactagtagtaaatgaatctaccctgttcgttgaaaacacttctccaacttgtaaatctttaatgagttcttttgtcgattttgatataccacgatatagctgataaggtgatttagttaaatgctttttaacgattttattcaactgctgatgaagagcttcattctttttggcttccatacattgccaaagaacagactgctcaaagtcagtaaatttttcacagacttttttatacatatcatattgaaaatcaacgctttcagcttttatagataactgttcaacatctgcaagattaataatcatgatagcctccgtatacttcagaagctatcatatcattgttagaaaggaaagtaaacaactttttgaattattttgcccagggagcccaaggcggagggtcaagatggtatgaagctagttcttctagaagagcatctggggcttcaattccataattctgtaatactatacggtattctttcttataatcactagaatcattccggatattcgtagaatgattatcttctaacatctcaaataaatccatactaattcctagcgataaaaaccaaagtaacgattagcttcaataatctttctttcttcttcggacattctccagcgtagtccaacatcaaaatgagcccagaccatcttaacaaatgcatttatatctttaatatcttcaataatgaatgttttacttttagaaggttgactcgctaatttaactttatcgtcttcaaacatgtcaaaaagaccatattcatgagctcttttatagcctttaatagttaaagcttcagaagaagaaaacggtgaatcagtattctgcaaaatatcttcagtatgctttataattagaataacattttctggatattttctttcttttatatctttaattaaaatatccggattttctgctaaaggaataattaatgagcactttttatcaagtgtatttactgatttaccttctttggacataaattctattgaataatgttttgctacttcaatcatgtgatttccttttgcctactaatggaccgtcaggaattttattttcctgaatgtatttttcattttcttccatcattttactgccaattttaagaagcaaatccaaagcttcatttgctttagcctttgcctcttctaacgtcatatctttggtcatgatttatcaccatagatgtctctcatcaatttaagcgctgagcgttctaatttcttttctttctcagcactaatcattgatttcatccattcttctgactcgttctgcatttctttatttgcttgttcaacccaaccatcatcaatatacattgagtttggtctattgaaccattcaagcattttctttaggactttcattcattttacctaaaacaatagtaggagcatcgtcaaatttatgaatttttagcaaatttggagttaatttattccataaagaagtaataaaatatgatagcgcaatttcttccgcaattatgaatttatttcccttatctcccttatctattttccagtcatgtactgaatcatatgaatagaaggacaacggtttattgttataaaatgcttcaccagcatcaatatagttagatttagtaaatgcttgaattgacgtaaatggagaattttgtacagtttcaataattccgatctttttaagttttatttcaacatcttctggaactggcattgaaataaaatcttctactagatacatgctattgtcatatcttttgtcaatcattactgctacagtaattggaacatccttgacaaacaccgtactaatactattgataaacatttcaaacaaaattgcttccataattttcctcaatcacaggatgtagatgaacaactagaatcacaagaacttccacatgaatcgcccgtccatacatgaacaggaacattagtatcatatgaatcagaactagactgtgtattctgtgtgttagatgatgtaggtactgaccagcgccaaggatttttataatattcttgggcttcttcataagtcatagtaacttcttcaactgttccatctcccatataaacatactcaactacagttaaaggaaggtagtcatttgaaataggaactacaccttctcccggagttgtagagaaaaaatctgtaaagaaatttttaaaccaattaaagataaacattacaaaaagcctcttttgaattcgacttgcttctcaccataatcatacctaatctctgcattaaattcaacagaaccatctgcgtacatcataaatgaatgcacaacaacttctgtagaccatggctgcagttcatatttcttcattacatgtcgtgaaatgataatatctaaatcttcatttggtttaatccaacgatttaacatagtgctctcctctataagataattctattataccatactcattttgatatgtaaaccggtaaaatgaaaaaaggaaccccgaaggattccttaaattattaaccacctatttctgtaggtgtaaacatcgcagcattcttagttttccagtcagctgcatcagaaactacagtagaatatgccgccttttcagaaggaaaggtctgataatgagaatctgcaatacgatgctcgttagaatagatttcaaatggaacagaaacttccatacctttaacttctttgccttcacctgctggatgagtaaaggtcttgatgttaacgaaaccacccataataaactcctttattgtttaattacaggtgtatttataacttataatttagcggctttccagagttgttcaataatctcttggtctatttctttagttatttcattacgtaataaagcagtaagggctttcgcccttttcttattcaactttttgagttgacgtttatttaaacgagacattaataacctcggtcttgacgtgcgaaattttcagcatttttcaggtaataaagtttaaagatttcttctgctgtaagaccaagaccttggaacatattcagaacgaaatggagaatatcaatcatttcaaatttaatttccagttggtcttgtggagacaaatcagtaatcagagtttcacgacgttcaccatgctgcgacttccaaggtttccatacagcagatgcatctttttcaccattgctcataccaccaagagaagtcagaagttcgcggaattcatcatcaatataatctttctgattacgcatccaatcaacaacttcacctgcagtagccaaatcatcaggatgacggttatattcaggtttatctttagctaaacgaacctgtaaagatttctgcatatcaagcataacttgcagcgggtctttttcatcaccgagaatatcccaatattcattttgagctttatcagcgccttcaatcagttgtgaacattcgttaaagtaagccattatttttcctttcaattcatgggttagtagattaattatacaataaatatataaagcaataaggaggacatatggtacaaaaattaatggcacttgttaatgccatcaaaggtaataagaaacgtatagcttttactatttctgctatggtaggaattttactctggaactttattttatcaccaattgcaattgcacatggtgttaatattccagtagttactcttgatacatttgtagatttagcatttgctttagttgggttaatttaaatcttagcatatttagataaccgcattttagccatcaacccctgggcaatattatttttcatatattccataatttgttcaggggttgcaccttcctttctaatcatatcattaacatcttttgatttccagggagatttatcccaaaacataaccctttctcctgcatcaactaatttagtcattcgcttaatagtgtcaggatgacgaggttcattatctaagacccacacacgcctatctttaaatggaacaacttctaggtctaattgaccacccgtaatagctataccattttcaataaaaagtgaatctataggtccttctaaaacatatacatcaccatctttaactcgttcgactccatatatttttgttgcctcaggataagctttgatggtgatatatttttgaggagcatctttctttaatgcacgcccttgaaacgactcggcttttccattagcattataaattggaataacaagacgaggctcagaaatttcctttttgtatgttcccggtgctatgctattaactaatttaggccattcggttgtaaaccaaagatatttccatttatcctttggaatacaacgagcttttacatattttataattggatggtcttccaccagtttatctaatctaacacatgacggaagagatttaattattttcttctcaggatgtttaggaagttctttaggtttttctactggacgacttttacctttttcttttcttatttcaaagatatactcacgatataaatcaggttcaaactcctttaaatatattccgattggtgcatgatagttacagttataacaatgaatatttccttcattattatcaccgtaataccatccacgggctttattctggtcggtttttgaatctccacaaacagggcatctaaaccgtaatttaaaagttgaactattatttacttgtgtgaatttaggtaaatgagctaatgcacgatacgcaaactcattatcaatccaaggtattgatgacatttttactcttctttttctttagattcctcttttttctttttaggaatctgttcaggacctttatttactacagcgcccgacgttgttccagtagagatattttcaggattaccacctgaatctccagctaccatatcttctttaataaattctttatatgttttcatattaacctctattcataaaagcattaaaaatttggtcatcaatagatggaatagcaaccttttcggcatcatttagcaaatcattaatttcatcagatagcataacacatgtgcctttatttcctgtaattgttactgcgcaattacgaacgttttctttatcaaattttaggttaatattttcgtagtgaaaatcctttaatgccgaatatatctttaaaatgaaattgtcttttactacaataaacccaacctcactattaaaacgtggttcatggaaactgtaataaaccttttcatctataaaatcgtatgaaattttttccatttttaaatatgaaaattcagaactatacatattaacctttattcataaaagcattaaaaatttgatcgtcaatagaaacttttactttaggctgttcttcaaacggtaattcatatccacatattacaattttgtgatcaatatcaaaatacacagaagaaatatgattaatgatgttttcagtaaagtctaaatcaacatcaatatctttttgaccacagcccaaaggataaataatgcgagtaattcgattatctttaacaaatattccaccgacatactctgtgttgcgtttaaagtttacacgtttcctaaatgaaaaatattcaggctctctatgagctcggctcataggacacaacgagtaactagaataagagatgtcaaatcctacaccttcaatatgagccaacgcgtcatgattaaaccaattataatcgtacgccaaatccattatattgtaatatgtgaaaggcaccggattaacatcatgcgttgtacctttaaaatctgcccaggcaacgatttcgttatctttaacaattacaaaaattgtgccaataagatatccacggttattttcatcaggcgttatattataacattgtgcaccaggaaatttaccgtatttaaacggtggatttttgtgcatataataaatcatattattcacctgtgatttcggttacgatatctttgttattaaagtttttatcgcaatacaaaacataattatactgcattacaccaccagacttaagctgtttttgcacttcagctttcatttcaggacgatcgcgctcaacaatattcataatatccgcttcaatttgagtttcaacttcagtctgatccgcagtcatagaccattcacacaaatctttatcataacctgccatagcaggctgagcagcacaagaagctaaagcaaaaattgtagcaaaaataaattttttcatgataatctcctcagtagtttatgtttatatagtatctcaatttccaacaaaagtaaatagttattttaaaacttctgcataatcacatgttacaaactgtttctctaacttaacgatcttacgaaaatatcttttgcattgacgaatctgcctcttcgtaggacgtacagcaaacttaataaattccactcgaccaaatggagggctttcttctgctggaatatctaacaccaattcccacgtttctgcaataagtgctttgaattgagtatttttcctgacgttatacggagtaggtttaaataaaacaatatgcatattatcctcggcaatctacttcacatactttcttgtcatcaatgaaagctttaactaatgctttattaacttcagcatattgagtagtagcccattgaacgtcatctttcatcattgtggtttctttagtaaacatgctttcattcttaaaccaccccataaaaactacctttaccaattccataacaatctcctcatttaaccaacaagactactataccatagtcttgtcagcttgtaaactaaaattttaattcatttgccaaagcatctaactgagctcgagtggattcatttctttgatagcgattctgttcagcctgaatctgttgtgaacctgctacttcactcacttcagttggagtagaatcttgttcaatttctacccatttttgatttcctttttgaacacccatcaaaaacttattccacttattcttatcaccatatcgtgatttgatttgcttaatgagttgttgttcagcagctgctagctcctcggtttcaatgaccgcaagcataaaatcagctgttgctggaagaccagcagattctgcaatatcgctcatgttaacatcggaagagtcccaagcttgtttaccgacctgtgctgcagtccaaagaacagtttcggtttcaacagccagagcacgcaattcctctgcaatagctttaacagttgtgtaactattttctgagtaaactctgatgcggcaagatttacaaatacctagatagtcgacaataatgattgttggaacaaaattcttcttgagctttaattcattcaagagagacctgaatgtgttagcgtctgctccaccagtaggatattgcttaacgattaaacgaccgagagtagatttctcacgccatttttccatttttcctttatactcagcgtaagaaatatgcccatcatcaatgtcatcaagagaaacatcgagcatgttagcgtcaatacgcttagcacagacttcttcggccatttccatggagatataaagaacgttatgtccgagctgcaaataatctgctgccaatgaacacaatcctaatgacttgccaacgttaacgccagccattaaaacgttcagtgttcctgtttcagctccgccttttgtaattttattcaaaatacgaagtttaaatggaactttacgagctttattcatataagatagccagcgtgcttcgtagtcatccatccaatcatgaccaacgtagctatcaaatgaaattgataatgcttggcgcatgatgtcaggaatagcaccaacatccggcattttcttatttcgtttttccggaggaagctcagcattagtttgaatttcgattattttagacgtagcattaaacatcgccctttgctgaacatatttttctgtttcttttactaaccaactgtggtcttctggagaatcagccagttttgaaataagtgtttttacaccagaatattctgtttcagtaaatgaactattttctaatgcaacatttaacgcattaatagatggaacgctatggtactcattaacatgagatttaattaatttgaatgtatttttagctggaccactttcaaaatattctgaatccatatatggccaaacttttgaaaaataagcttgatcaaatataagatgagaaagaataatttctaccacacttactccttaaaagaatttaaactttttctttgaccttttattaaatgcatcttgtagttgcattgtaatacatttttctacatgaggagctaactcagcttttctttcttggtcaagaacagcaaagtccattacgacttttccatcaacccaatctaattttgtcacatacacaatgtgtgtagaaccatcttctagtttaatgataatctcctggataacattttccatggcagatttaattatcttaagagattcattaaaaagacgttcttttctttcttcttccccctccgaagagggggattcatcgataatttctagatctaaatctaaatcatctttattcattaaattcttccatatcacttaactgctcgaggtcagtttctaaatcagcagctgatttacttttactttctggagatttaaatttttcaacttttgagttaatcaattcatcaacttcagcttcaacaatttcattactatcaatagcacctaactgataagcacgcttaatagcatctcggaatggttgatgcttaaataaaggaccccagaatgtagtgcagttggtatcttttgcacgccaagatttttcttcgcgaatcatctcaccggtttcttcatcaagaaattcacgagcataccaaccattcttaggttttactacaaatcctaattcaagagccatatctagcaatccagaataaggatcaataccaccgtcaaatttaacatcaataaagaatttacttttttctttaacggtacgagatttttctacatttagaacaaattgatacccctgaagatcagaaccatctttaatctgacgcttaccgataatgaatactgtatcagccgaatacattacgcctgtaccacctgtcatcacggttttactaaacatttcaattgtttcaattgtatggttaaccgcaacacatggaatatttttaatgctaaagtaaggagtaacgatacggaataatgacttcagtgatttagcacgagtcatatctgccacagatttttcatttaaggcatcttccgtttctttcttagaagccatattaccgattgagtcgatgaatacaataaccttttcaccgcgctcaatagcttcaagctggttcaccatatcaattttcagctgttcaactgactgaatcggcgtatgaattactcgttccgggtcaactcccatggatcgcaaataagctggagtaataccaaattcactatcatagaatagacaaaccgcgtcaggatatttgttcaaatatgccgcaaccatagtcaaagacatatttgatttaaagtgtttagaaggacctgcaaaaatagttaaaccagactgcataccgccatcaatcgcaccagaaatagcaatattaagcattgggatttttgtacgaattacatccttttcattaaagaatttagatgtagtcagttcagcagtcattttagaagtggaagctttaatcaaacgggattttaaatctgcaatagacattcattttttccataggcatcattatattttcctcactggttaaagatagagtaattataacacaataaatttaggcattaatcaactgctatcggatgaatagcattaaacttatgaaatgcttctgatttttctttacgcgaaacacacatgcgaagaacctttaatggctcgtcttcttcacccaacgattttcgtttttcaatattagaagttttccaacgagcttgctctggaaactctctattgatttgctcaagcgctctattatgtttagaattactacgaattgaactacacccgccaggagcttgtgcttttccagatacaaccagatatttgaacaaggccaaatgcggataaccttgattaattaaattgagaaatgcatacatatcttcgcacaaatcaatttttccatacccaatttgttctgtcgtaagttttccaaggtcataccatgtattcgtgaatccatatgaattttcacgataattaccccaagatgaagtaattttaaaaattggtaggcgagcatgaccgtgataatacccgcaatccatggcatcttcgacgtattgaatcaattcatagaactgttcacgggttaattgattgactttatctacacaacgacggtcatctctttttcgcattgaactcatacgaatagtagtatcatcgtcaatcatccagattcgttgacctgcatacatatcagtaattgctttacgagtaccggcaattccgtttacatcatcaggaatagttataattttagctctagacccataggcatcataataagctttttcttcatgttcacgcactacaatatgcggttcataatcagtcggaaacatatcaagggcagaaactgccccgacacgctgataacttggaattacgaattgaatcatttccacacacctttatagtcttttttcacaatatgagtttcgccagtattccaccaatgatcaaccaagtaaaaatgacgagaatatacatgaagacttccgacattccatataatagaacctgctttatactgacgagttgaatcgccggcattcaaatcagatactaatttatctaatacgtatttttgccatgcataatcattacggaatccgaagaccacgtcatttgagcgcatgcttactactgcatttactttcttatcacgaatcaggtactgtactgtattagtacacatgaaatctgacataccatctttattatagtcaaattgcatggatggacgagtataaatcatgataccacgtcgagaatcaggattttgaccaagttcagctaaacacatatcatactgggcatagttatcttctgaccaaatagcccaaccataattcgagttaatttcgcctttagaagatgctacttgttgccaaatcttcggtgtttcacctggaatatctttaacgaacaagctcttagatttataccattcaagttcacgctgaatgtattcatcattaagagcgccaaaaataaacggttcatctgctacaaatgatgcgccaataatttcaatagttttaacaccagttttatcaactacgaaatctttttcttttaatgcaagccccaaatgaagacggatttcttcaactgtcatagagtcactaatcatttaaacctcaattgatacattcatatttaacttgtaacagtaataagctccaacctaaaataatagttggaatcataagaggaaccgttacactatagtatatacttattataatcatcaagattaaaagcaacaccgctataattttgcttttcattccttctctctgatgataattacctgatttggctgtgcagactttttagtttcacccgcaattgaccaaataaatgtaataaaccaaccaataattgaccagttaaacagtaaagacgtgaaaaagattcctactgtcgattttgacccacgcatcaaggcgatgaaccatggaagcatgtatataataatagccaacacacctgaaactaaaaccataaaaattgaacctgctactaaagtttccatgttttcctcacttagttaaattttttacgcatgaattataagaattcactacatactccatcggagcatttttaccggtacgccattggtaattattagcccaattagcccaaagctcggcgcagtagttttcaattttttcttcgcgtgtaattacatccgaattacgatatgcttgagcagattcatctggacgaatagcttcgtcaaaattcgcctgcatttgttctactgtttgctttggagcttctttataacacttgacattaggattataaaatttacttgaacaatttacaatttttcctacatcagactgatttactaccggtccttgagctacacaaccagtaagacctaatgcaataaccaaaatagcgattttcataataatttcctcaaatgcaagtagtaattactccagtagtgcttatgcaggtattacctatttgtacacctaaagatccatttgtattcacatgaagattatcatcaattttaactgatattttaccattagtgtgaataacggtgctagattcaatcataggttgagtatcattttcaacactaacaaatggaactgctgctaatgcaactaaacaaactgctaagcatcccataacaattttcattttattctccaaatctgtatcagtagttgatagttgtatagtaccacagaggaacagtcttgtaaacagttttgtgaaaattttttagggaattctaaatgtccagaatcatctgtttttcataagtatagatttatattacttgtatgaaaaagggacccggaggtccctagatttattctatcagccaaacaggaagtctaacgaagctttttcctcatagtccataccagccgattcacacatacccgcaagcggtttaacaaacgatttttggaacaaagttgagtagtcaatccaagacagtacgtcagaacgaatttcttttggaagttctgtgcccgacggccaagcaatgcatttgtcaccaaatgggtttccttcacgcaatggaagaaccattactttatttccatccaaaattggagctacacccagaccactaacagctcgacgataagttaacacaccacgaatatggaacggacatttaaatcctggccaacctttatcatcatatttcgctatatcgttcgcagtttttacttcagcaataactttatagtcaagttgacgatattctttctcaaagttcttataatattcttgaacagactcttcgccttcttgaagaatacgacgaatactttcttcaagagcttcttgaaccgctttaggcgttgaactttgctgagtttccatacccatgatttttagatgcggttcagcaaatcgcttatcttccatatcataaacgttcagagcataacgctttttcgctttccaaaatccaccaacgccctttgaaccaagtggagggcaagaaatagcttcacggtccatatgcatcagatgctcgcggttattcatataatcacataactcacgatatgcaacatcaatcataggttccatctttttcttaccgaactgattcatgaattcaactaaatcgttctgctctttgaatcggtcaagaccaactttttcaataactttatctacacaaacatataccgaatcagtatcacctgctgcgatgaaatcttcaccattagttccgcacactttattcagatactcattaattttacgagcaatccactgaataccaacttgaccaaaaattgtgatagcagtagcatttcgcaaatcatagtaacggaaatgaatattaccaagagcaccgtaaaggctgttaataagaattttacggttcagctgatttgtattagcaagtgtagccgctttttcacattcttcaatcaaactattgagaacagattcagtataattcgatagttcatttaagaaatcatcactgaacttaacatatcgttcaacttccggtttagttgaacaagaccctgcgcctttcataataatctttttaatagcttcggcattcatttcttcagcgaacattttctttttccagtctttacgctggaaaaatactttagcgatttcctttggaatgataccttcttgatgcttatcatacatccatccattcggagaacaagaatattcatcactcggtttaggagctgttcctgcgatatattcatgaattggatgaactttaaattgtccacgaatagtctcaggactaatgttaacctgacgaataatgctaggatatagagacgtcaagtcaaaactcataatatatcgacgagcaattggtttaggttcaaatacaaatgcacccggaaaactttgtttaacgtgcgaaccttgttgaggaataaccttatgttcacctttcaatgagttaaaaataatagcatcccaagttttaataggactcattacaccagaaaaaggcattttagcgtaataagacatacttaaaactagatcgataaacccacgaattttatcaatcgcttgaactgattctacgtcaatgatgttataactaatgtatcgctgatgattagtctcacgaagtttattaataggaccgtcgtatggtaatttaccttttttggtttcatgctgagcaactgattccaaagagaatgacggcaaattagtaaatgcgaatttcttatacaaatctaaataatcaagaatagatacgccatcaatagaataaatttctttgctaccgtacatattttggataagtttagattttactcgaccgattggagagaagcgtttcatactgcgttcaccaagaaccattttaacacgattcatgatatacggaacgtcaaatccctcaatattccaaccagtaaaaatagcaggtcgtttctgttcccaaagattaatatattccatgagcatatcacgctcattatcgaatggcatataaattactcggtcaagaatttcttgaggaacttcatcaccaccttcacagtcaagcttagcagctaactttgcatcccattttgatactgaaccgtacattgaattcaaaaggtcgaaaacataaaaacgatcatcaattgaatcgtaatgagtgatagcatcaatttcatattcagctttcattgggtcaggaaatttatcaccagtaacctcaatgtcacagttagctacacgaacaaattttcggtcataaacaatttctgaaccatatgtatcactgatataagcgagtttaaaatcgttcataccgagagcttcgagaccgatgtcttccattcgtttcatccaatctcgagcatctttcattgatggaaatttttgaggagcacagtttttaccatagatgtctttgtactttgactcttccttacaatgtctaaacatagttggaagatattctacttcacgagtacgttcctttccgttttcatcaatataacgttcaacaatgttatttccgactgtttcaatagagatataaaattctttcatagatattccttagtttatagcccgagttattaggctcttgatatattatactccaaataaggggccgaagcccctttgctttaaatttctattgtacgacgcgatataacggacttgccatctttatttgtggttttgataatcgcatgaaatacgcgttggcgtgggtaaactaatcgttggaattctttttgtttatcttccgggaggtcaaaaactagttgggtagaagacagaccatatgtttgttttagattttcgaatattagaaaagcttcggtaaactgaatctctgattgtgtcatataatttaccttaattaccaatcgtatatttaggaacgagtttccattcgtgcttttgtttaaaagaaataactcggaagttattagttaaatctttcataaaagttctttgtccaggaacgatttcaattagtccccaatcttctaacagccatgcaatcgaatcacgacgaacttcatcttcttctgtcatttcaacttggcgaccatccatacgaagcatttctttaaaatgaacgatatagtatagtccttttttctgaagaatatgacaggactgatacagaactttatctttattattagcaattcccatacgagtcaaagtttcttttactttcagaaaatcttcaggttttttaagagtaatttcaatcattttaccattccaatgctagttttttgagttgtttctgttcttttacgttcttagtcacttctttcaaaaaatcatccgtgactaaaccttttagttcttttaatactaaaggaagttttccatttttagtaagaattgatttatagttaattgcatcatttgtgttaacttgataccgcttagcaagtaacttaataatcaatacttcggtggaatcttcaactagttttgcccatttaccatatcttttaccacgaggaactgcagccattagataattaaaatgagcttcatcgcttaagcctgatccaattaaattcatagcatatacagctggcatgcactctggaaattgtgataatgcattttcaaccatgaattttgaataatctttttgagcaatagagcatttagttttattattaatagctccaattatttcaaaaaattcattttcagctttttctttaaaagaatcagcagcggattggacagctgtccaatcttttgaataccaagcaacttgatgctcgtttaattgaatatcatcttcaaataagctcatatcacttccactgcatttcacatgctaactgaatgaaaagataaactagatgcaattcagtattagctgcaataccatgatactgattattttcgccgacaatttcgtacatacgaataatactctgtggagttacacgtgaatagatttcttcggcaagtttacccacgaaccacgaataatcggctgcatattttggtgctaaagctctgagttgtttaacatctttatttttgagagactcaagaacatcatcaatagcaccacgatcgttagtaaccagtgataaaataccagcatccaaaacacctttagatgaataactatcgagctcgccaatagttttacgaaaatcaggaaaattctttttaaccaaagctgctacaactttcatatcagctatagcaattccttcatgcttacagatttcagtcaatcgacgaatcatctgcttcatcatttcaattttatcttcatcggtcggttgaccgaatgtgataactcggcagcgtgactgaagcggtttaataataccatcaatattgttagcagtaataataatactacagttcgaactataagcttccataaaggaacgaagatgtcgctgagactctgctaatcctgaacggtcaaattcatcaataacgattactttttgacgaccgtcaaatgaagcggcgctggcaaaattagtcaaaggaccgcgaacgaaatcaattttacaatctgatccattcacaaacatcatatcagcatttacatcatgacacaatgcttttgctacagttgttttacctgttcctggagaaggagaatgaagaataatatgtggaatcttacctttacttgtaatagatttaaaggtttctttatcaaaggcgggaagaatacattcatcgatagtagatggacgatatttctgttcaagaatgtgttctttttcatttacggtaatcataatttcctcattcaagttttagtgtaaattataaagggccgaagccctctattaaaaatcgtgggtagaatcagcttcaagagctactacataattcgcgtgttcaccttcaaatttagcagcaccttgtttaccttttgcccagagcagaagtttataatttcctggttgcattttcatatttgccatattgataatgaaattaaatgtattttcaccatcataatcaccaagagtcaaagaatatttaacacgggtcagagcagaatcttctactttattaaaaccgttaattacgattttaccttcttttaccgtgatagcaattgtatcaatctgcagaccacgagatacacgcaacagctgttgaaggtcttcagctttaatttcagtaacaacagatgctactgggaatggaattggtttattaggagcaactactgtactcggatcggctgctggccaaaaaattgttgaacgggcatcagcaattttaatatttccatcttctgactgggaaatttctgcatcatcattaactaaagacagaataccgagaaaaccattcaaatcgtaaattgctacatcaaaatcaatagtgtcagaaatatttgcttccgcataagttgtaccattaactgcacgagtcataataaattgaccggatttaagcataataccagagttaatagtagcgaaatttttaagcagagcagtagtatctttagacagtttcatgtaatttccttcaattcaaatgagatttaattttataactaatttaataaagcaattaacgattaaaatcagcagcaattgtttccgcaacaatttgagcagcaacaattagacgttcatctgcattaccgcaataatcatcttcaaggcgttcaccgcatgaagtcataataaatttagcaccagcatttagagattctgtcgtatgtttgcgcattagttcaatccatttattacttacttcacgatcgatagcttcataatacgcatgacgagcaggtgcagatttaattttgttctgaataacttccattgcgttatcagaaagagacaaaacccatgcgcgacgaattttattttggttttgcggatttgagtcagaacgcacgtgttttggctgaatatcttttacgtcaacagtataattcacagtaattttagtcataatacacctttagtcataataatcagtaacagtccaagcttcatttctattggacattatttttgtatattctgctttaaatgcattcctaagcatagattcagtaactatatgctcttcattagaaaaattatttctcagaatatatcgttttatttcaggaatagttaatagatgctgtccagttgaatattccatgtttttcctccatagagattatactctaataaattaaagcataatctcttataaattaaaccattacagtaaatcgaccaactttcttcatttgaagatgctgaccgtatgcttgcgggtcatggtctctatgcgaaataacaaaaacattagtattttttaaactatctaaaatagttgaaatagcttttacaccttcaacgtcggtcgctgaatcaaaaacttcgtcaagaattaatgtgtttattttaacgcctgaaactttttcagcaatatcacgccaagtaaataaaagagcaatatcaattcgcgctttttcaccttgactgaatgaagcataactaaaatcttcacgaccacgtgatttaattgtctcattaaattcttcatctaatgtaaacacataatccgcttccattattttaagataatggttaatctgcttattaaataatggaatgtactttttaataatagcacctttaataccagaatctttgagcatatcagtcaaaattcctcggtggtatttttccattactaaattagtttttgtcttaacaattttatcaagttcttcttgaagcagtgctatttcatcagcatggtcaataaactcagaagatgctttttctatagccgctttaacctttttagctttatctactgctgcgatcagagattgctttttattgcgaatatcatttgccaacgactgctgggttttaatattatctcggtattcatcaacaagaacttttaaattatcacgatgtgttgaaagctgttcaaacgaatgcgtacattcagaaactttatctttaattttagaaacaactttatcacctgaacttaattgtgacaagcaggttgggcataatccaccttcgtgatacatattaatgactttattatacgagtcaatttttgatttaattaaaactgcttcttgaccgattttattaaatgcatcagtcgggtcttcatctaaaacaatattaactaatctttcattagcttcttctatttccgattttagcgttctagcttcttttgccaaatcatcatacatattttgaagacgagtaaggttgtcacccgttaattttttctggcgttcaacgttatcattatatattttaatttgttggataatactatcttttttaacatcaagcacttggttttgtgaatttaattcacgtattagtgctttattaagcttatccatttcagctaatgttcctacctcaagcaggtcttccacaagctttcttcgcgcaggggtcgacaaacccatgaaaggggtataccctgctgtaccaaggacaacaatctgcttgaaactggcatatgacattccgataagctgttcaaattctgcttggaaatctttactgctggcagattcattaagacgtgtaccgttaacggtgatttcgaaaacgtttggtttttgtcctcttttgatatagtactttttctcatcatattccatccacagttcaactaaaagttctttcttatttgtgctgtttattaattgacctttctttacatcacgaaatggcttgccaaaaagcccaaatgtgatggcttctaacatagtagacttaccaccgccatttcgtccagtaataagagttttttgaaccttatctaattgaatgtcaataggatttccacctactgacattatattttgatacctaactcggtttagtttaaaattcttcacaaaagattccttttaatgtatcttttagaccattctatcatatcatcataatctaaaaagtattcatcaaattcagccatgcaaacaacaccttgtgctacttttgatgtgatataaattattccaacatatctagaatcttcttcggtataatcaatatttgctatgaattcatcattaatgtcaaatgtcgaaaacttcacagtatgcatccttaatacaagatacagccatatcttgtaatgatttaggtgtatcattatctaaaatgttgaagttaaaagatacggcccaatcagtgcataccgtaacctttttaatacaattatcttcaacctctaacggttcaaaccaatattcaataatttctttatgcccaatatcatcttttacttcgcattcaaaatgctgactcatcataacatttttaaattcatcaaaagtcattgtgttgcctctacatataactgatttgcatattgaataagtgcttcgcgatcagaatcagtgatgtctggaattgcattaatgtattcttccatcaatgtctgaagagattgaacttcaacttcttcactatcatctgactcgacagagttatcaatctttgacacaactcgtaatgaatgcacaactttttctagttcagattcgaacttcgtcagatttttgtctacttcagttactataacacgtactgatagatttgtaaaatctttatagtcaatttttcctttaaatggataatgaattctacgatgccaggtagtattgtttggaataaattccattcgttctgtttctgtatcaaacatccagaacccacgagggtcattctcgtcacctgcagttagtgtccatggtgtcccaatatatctgacgttagcagcctcagagatagtatggaagtgaccagaccacacttctttataagtcttaaggaaatcaggttcaagaccatgagatttcattcctttataaaaataaaatccgttcagttcccagtgaccaacacaaaaagaagcagatgaagttttgatatgctcaagaatttcaccagtattttcttcacacatccaaggaattaaatcaatcaaacatccgtcaaaatctactgtagtaggcttatcatacactttaacattaggatatttagccaaaagctcagtagaggcatttggggttaaagtatttttaaagtgcatatcatggtttcctacaacagtatgtagggtaataccggcatcatcaagcatttgaactatttcacgagcgaactccatagttttatgcgtgattgcttttcgcacatcaaaaatatcgccgtattgaatccaggtagtaattccatttttcttagaatattctattgcttgtttaattccatctaactgaatggattgaacccactcatcatcggctttaacgcctaaatgccaatcacctaaatttaaaattttcatatatcaagaaccgtcattgaaatgcaaaataaaattattgaaataaacccgtctggtgtgctaaagaacccaatccaacatgctctagtgaatagataaaatgcaagaaaaagaatcacatatccaagaaatatcattatatcaaactccgtataaagctaaagggccgaagccctttattttgtaataatgtcaaactgctctttaaagcagaagcttgaatcttggtgctgatacaaaaattcataagctttttcgcgttcacggtcataaagagctcggtcagatgacagttctttaatacgttcaaatgttgattccatgtcattttcatcaaaccaaacgataccgctatcatgagaaattaatggagtgttatcaacacggaattttaaattttcgccagtagatttccaaaataccggaattgttccacatgcaccaagctcgagatgagtatattctaaagaacgttgtagatattttttatccaacttactcaactgataaccaaaaccggatttactcatacgttcaagcatttcgctatttacataacggtcaagaatttgcgttggcaaattaggagcaattttaatttggtctacttgatgaagacgataatactcgtatggaattcctttttctttaataggaatgaacgctggagaacgttccagaccttccataatagtacttagtcctgcaggtttaagatgtttttcatgaaaatcaaacatctgataaaaacctttccatgtagtcgtgcgaccaatccaacggttgatattcatgttaatttcagaaacatctttccagtaggttgaccgaaccttcgcaatatccataggaggctgaaagttatatactgtcggtgcttcttcaatatcatcaaacagagaaacagtttctggataccattctttcatcagaactttattaaaatcaccattatcagaatggctaaaaatgacatcagctcgacgaacagtttcttctaatcccaaatttcggcgcaaagaaagagaagaatggtcatgttgataaactacaacacgaacagaaggtttaatgttatcaataatttttttatagttattaatagtgtcttcttcaaccgaagtagcaggaactgaattgataattagaatatcacaatcatttaccagcttaagtgttttatcgtattcttttgccaataaaaccggaattgaaaatgatttataatcatgcgcacaattacgagtaaatgatttatctttagcataaaccaaagttacttcatgaccatttttaataaaccaatcacgttgctcaagagaaaatttagttacaccacaaccttcaagacctcgagccataaaaatacatactttcatttaatatcctctttgttttggtttattttaccaaaaatttataaagcaatataggagccgaagctcctatccgcataatacgccatatagaggctcgttagaacttttaaattttatgcgcttatatgttatagttccttctgctttagctttatcatgagactctttaaagcgtctcatcatttcctctttagaggaacgaattttattataatctatttcagaagtctgggtgttcatctttcatagttgccaccattttttgacttgataagaatcaacccacactttcatattagggtctgctcttacaataggaggattaacttctttaattgaactatcatggtattctttttcagaaattttcacacaaagatgaccattcaaagattcagtaaatcctgcattaattttaagacgcttgaattttacgtgtgtaagcatcaatcatatcctcaatctgcgatctagtagtcttccaaagaatactgatgagttcatcgttatatggctgttttagaatatcccgacttttcttgatagcatattcgtattgagcaaaattattgttttcagctgcgatctgagcgtgcttataaagacgattcagttcgcgtttgtttttagacaataacttatttgcttttctttctgcttcaagacggttcttttcttcaatagaagaaataagcttttccacttcatcattaatttcgggtttatcagtcatattatttctctaatataaaataaaaatcatcatctgttaaatgataccgatagtttaattctacaccattagatttaaaagcggtatcatacggattttctggatcaatatcaatgtcaagagctaaaacttccctgagatacattttaagtaaatagggaatagcttcaacttcaggtatttcttccaagaatccggagaggttaatcgttagcctcatataaaaaatccaaactaggagaatcgtctacaacacttttcttttcagcccccggtgttctataggttgattcttcgtaatgcgtcattttatcgtagatgtcttgaataaaagtttcatctactaacgcaaccatatcgtcgtcacggctgtcatagacattgtgaacgaagtaactatatttctttgcaacttccttacgttcttttttaatacgctggacgaatgcattaaaacaagcttgagttatatatgcatgtgggtttttatatttcgtttcatcaaaattgtgaagccccttaatagaagcttctataccatctgcaatcatttcttgtttccaagactgggtgtatcctgaaaagttgaaacgtttagataagccttctgcaataagcataatggctaatccgatagtatcattctgacgaactactttatttgggtctttattatttgctaattctgttttccaatcaataatagcttgtaaaagctctttattgtttacgtaattatatttaggcttagtttctgacattttcacctcttagctcaattcatagatctattatatcataatatttgaagatctatcttaaagcatagaggatatcagttatctaagtaaacagtatgcttggaacactttctccatcatctttttaaattcatgaatatctatataatgactagttagatcagcatgatataaaaagtctaaaaacttttcatgtgtactagcatattcgctttcatttaattcagaaacatggctttcccaatatccaacaccagtcttatttgggaaaaatgaaattttcatgtattgatcaacatagaaaatgccataattttcaatagtaatagaaatattaataaatttcatacattcatcagcttagccgctccaagagctgcatctagtgaatcaaattggtcaacatattcaatcaattcgccataattggcatataaccaccattggctaaattcatactcaaggatgaatccgtttccttcaatttgagttaaaccaatgccatttgtatttacttcatatccagcaagacgtaaatcgttaataagagcttcgttcataattataccttagtaattttcaggtctgcaaattttttcttgcgttgatttttcatgcgacgaatagttttatcggaaatttcatgcttttgataagctttagattctacaccaaaagctttaacatcaaattctgacaagatatattgaaccaataattcacggacagtattgcgtccaatcttctgatcattctgtttcatcgtttgatgaagctctttttcccatttatccaaaatttgaggagttacaatatcgcctttttctagcaaagaaactactttatcatatgcgtaagaattgatggcgtttttaatttgaatagtcatacattatcctcaattgcattaaaattttattatccaaaaagggccgaagcccttagctaaactttttggcacccttccagccttcgtacatcattgcggctgatattaatattgctcctgagcaacttgaatatttgtgattccaaaaccagtttagaaaaacttcgtcatcaataccttgtgctatcatattttcaaagaactgacgacgagcttcggcaattcgctgcgataatttagattcaggattcatttaaatttcccaattaccattttcatcaataaatttaatccagtcatttactgaccacctagttgtatcgccttttggagtaacatttaaagtgtataacccctgcttaaaaagcattcgtttgatattcatattttcctcagctataacgataacactcgtttgatttacgtttagcaactcgttgagaagtattataatcaaaatcatcgtcaatgtaaactgattttttcaactttcttacttcaccacgtaattggcgatttagctcatctttaacttctgaatcaatacctttcattctacgccatttatctgagcgaaaaatgttttcaaccatatctttatgacttacaccatcaggagctttacgctttccgaaatagtcataatcacgcacttttaagtctttacgacgatacgttttacccatggagtttaatttccttagcaactgaactaaatacagcacgatcacaaatcaaacgtttgttccatttaagcaaagtataatgaacatctaaatcatcgactgctgtaacaataacgatatgtccgttaacacgatagtactggtcaattttaatctctttatcaatcatatcaattcctcaaaggtaattcatatgttaataataccacggtttgaacttgttgtaaacaactttgtgaaaattattttagggaatgataagaagggaacgatagcttagaatggtaatatacagaatgtaagaaagaaaggcccagagggcccgtcttagtcttctatgatatctctatcatatccaagtgaaatgagagtttctttgaaatgtttaatgttcttttgtctagaatcattaatgaaaatgactggataacgaatattaagagatgtgaatccagcgcgtttagcaagagatacaatcaatgggcgatcgtactcaatcttaccattattagtaagaactttatagaaagtaaaaggagcattgagctcctttagaagttttgtaactgattgacatccaggacaacgacctacttcatctggaattccatagacttcaatcttattctttaagttcgagttttgttccacgagaaataattccttggtaagcccaataaggaggattaacagaatcctcaccagagttttcttcaggaaaataaacctggataacaaatccagatgcatcaaaggtaaaataaaccgtaggcagttcacctaacaattcggcacgagcattaatttcttcgagatctcgttcacgtccagcccaaaaactaggatttagactacattcgtaaaaataatagtcattaccgaacatatcaaaccccttccaactctctactacataccgctcaaaactaatcataattaagcctttttatcaagaacagcattcagcttgttagtaattttatccagacgctcattgaactcactagaagataagcccttttctggagaaattaaactaatcacgaaaaatacaacaataaaaggaataaggaaaatagctccaactgccataaacagaaagaacgttacagttgtaagaaaatcagctaaacctttacgaaatttatacatattttacccttaattgattaaccaagcattgataagcactaaactatattgcgaataaaattctggaccaaaatgaaaaatcatatcatttatagtatccataatgtaattcaatttaatcatgtgtccacaccccatcggtatttgaccaaagtcgctgattatctgatcctcgccacagctttttagtcggaagatttttctcatacttcccatcaataataacatcaacatatttaagcatttctagttgtttaatatcttcaaacttatatcctgtccacaaccaaatgcttttattgggataaagatttttaatagtttgaaccacagagtgaatcacgtctctgttatcaggataaagagggtcacccccagttatagttaatccttctatataatcattattcaaacattcaattaattgttctagtgtttcaccagtgaatggaataccatttctagcattccatgttgatttattataacacccttcacatttatgcaaacaacctgtaacgaaaagaacgaccctgcaaccagggccattcacaaaatcgcaaggataaaatctatcataattcattggtgtttaaccctatgcatgatttctttatttttaccgagattaaatccacgttcgttcggatttcccaaataaccacatgttcttcttattgtgttcatctttttaggatcagtttctccacagatagaacaaacaaatccgttttcagtaggagtcatttcatgggtacttccgcatgtaaaacatttatctactggcatattaacaccaaaataatctaaatgttgtgcagcataatcccatacggcctcaagaccctttaagttgtttttcatatcaggaagttcaacataagaaatgtgaccacctgtcgcaatgaaatgatatggcgcttcacgagaaatcttttcaaacggagtaacattttcttctactgaaacgtgaaaactgttagtgtaccagcctttatcggtaacatcttttacacttccatatttttcggtatcgagtttacagaagcgataacaaaggttttcagcaggagtcgaatacaaactaaaagcaaacccagttctttcagcccactgtttaagacgagcattcattttagttaaaatttcttgtccaatatcacgaccgacaagaatattcaattcatgaataccaatgtatcctaaagacactgaacttctgccatttttaaataactcaattatatcgtcatcaggtttaagacgaaccccgaatgcaccttcttggtaaagaataggagcaacagtcgctttaactccttttaaggaactaattctacacatcaatgcttcaaaacataaatccattcgttcattgaataattcaacaaatttctgttcattgaactgtgttccaatataagaatctaatgcgatacgaggaagattcagtgttacaacaccgagattattacgtccatcaagaatttcattgccagtcgaatctttccatacactcaagaaactacgacaacccattggagaaacaggaatagatgagccggtgatagctttattgttcttagctgaaataatatcaggatacatccttttgcttgcacactctaaagcaagctgcttaatatcatagttcggatcgtctttataaagattaacgccttcttcaacgaacataacaagcttagggaaaataggagttatcccatcacgaccgagacctttaatacgatttttcagaattgctttctgaatcattcgttcagtccagtcagttcccgtaccaaatgtaattgttacaaaaggcgtttgtccgtttgaactaaagagagtatttacttcatattcataagcttggaatgcatcgtatacatctttttctgttttagattgagcataattcaacgcatcagcgatttgccatttttctgcatcctcaatatgttttgcataggtgcgtttaacataaggagaaagtactttatctacattagcaaaagtcgttccgccgtattgatgggaagcaacctgtgcagtaatttgtgccataattgcagtagcaactccaattgatttaggagtttcaatctgtgcattaccgagcttaaatccgttttcaagcattccttttaaatctactaaacagcaattagtaaatggaagagcaggagaataatcaatatcatggaaatgaataattccgctttcatgcgctttcataataaaagacgggaccatatttttggcaatgtgtttagacacaataccagccataaggtcccgttgagttggaaaaacacgagaatctttattagcattctcgtttaaaaggtctttattagttttatgaatcaatccttcaatttctttttcaattgtcattttaaactctttctaagctgcttcttaaatgaagctattaattgtgttttagtgtcagattcattatattcaaatcctctttgaagcatctcagccatcatttcctcttttcctaaacgagaaaattcctttgatttatctccaataaagttagggtgaatattattttgggtgtaatcggattttaaataagtaagtaaattttctaaccattcaagataatcaacaccttgtccttttaagccagaacgattaaatttatgcttcatttgaccttctgcggcattgcagagattacaaagcaatccacgtacctttcctgctttcggtccatttaattcatggtcatgatcaagatgattagcttgaacatcaggatttagttctcgttggcaaattaagcatttaccattttgtgcatcataaaatttctgtttttcttctttatataatttgccagtcaataacataataaaacccttaccttaaatagataagggtatttattattttcaagtattgtaaaaggctcgatgcaatcgcttatactgccgaatcatctttttagtaggacgagaataagttcctacacaagtggtcatattagggtcggtagggcttcctttaataaaaagtttccaaaccttaccgccatttaacttttcagtataaatcaattcagttttcattaaaacgctcggtcagaaaaagatttttgagtttcaagccattcaatatattctgcggcagcttgcatcaggttaccttcatagccatcgttattttcttgtgcagctaatttagctaatgcgtatgaaatacgttcaccttgaaaatcagctttaggcttctgaacaacttgattagttcgctctacaacttcttcaatttcgccattttcgactgattcagtattccacaagcaccaatacgtaattggcttatcgtagatgttaataatctttccatcagaaagttcaatttcaataattccagtatcaggctctatatcatcttcacattcttttgcaagttcacgaactttaaagacagtacctgcactaagttccggccagtaattacacagccctgtatcagcacgattaattctaaaccacttatctactgtaatcatgtcccatctccatatcaattaagtcatttatcgttggttcattatatattgtttcttcatcagtgtaaaccggttcttccggctctggctctgcagtttcccatctagccgcccaccaaggttttatagcgtaatccattctcgtactatctgagttactacacgttcacggggctcgactagttcaacagtcggaactgcataataccagtcagaatgataagaacctgaccgagattcatttaccgctacatgtacattatgttttggactaaagtaaacacactgacgatattgacatttaccatcttgcacccagtcttctatttcgacaggtttaagataatcggaaaaatcgaaatcatagttttccgaaaatgcatcatggtcttcaatgatttcgctcagaactgcatcaacatctaatttattttcaatagtcatttttcaccaattaatttcgcaatttattaagttcttcatcatcaatccaggattctagtcctgatggcagggcacattcaatttcccaaagaagttcttcaattttctgaagacgttctagttcttcggctggaatagtaaccattgacggagctcgtgatacattaatatcgtaaatcatatttaccccaatttaaccatacaatcgccgtatttccacttagaaatagacttttcaccattagaataataaacttcgagtttagcacgattatttttaatttgaataaccttggctgtcatcaaagttccatacccgtaataaactgcaacttcatcacctacatataccgcgcttccacggtaatcatggatataatcagttccttcgagcatcatttaaaatattctcgcagttggtcaaatccaccaatataacttccatcaggagcaaatacctggggcattgtcaagccgatttgagtatcacgacctagtttagtcagaagctcagcgattttctcatcatcaaaaacacctttttccggcataatgttgataaattcaaacggctgtttcttcacggtcaaaagacgttttgcattatcgcaatacacacatttatgaatgttgctatcataaccatatactttaaacatattattccttaattcctagtacttgtttaaaagtctcgtcgtaatcaagactttggcccgtttgttctttatgtttgtatataatatcacttacttctgatagcatatttttgtatgaacgagttacagcagatttaagcacgctgtatctatcaggaaatttaccatgttcattataataagctattgctaattcacggactgccttttcagcagcctccatatattctttacgcttagtcatttttaatccaaaatattattaggcattggttgaacactcacaagttctttaaagaactcagtagagtcaggcaatttaaccatttccggagcatgcttactgaatttatgtttacattgacggcatttatattcaagctctggtttacgccagttaatcaattgaacttgttcagtaccgcattcagggcaattaggaacgtttttagaagctctttcacgtcgttcaaccatagccataatagcatcccatgctggaggtttaaaatctaaatcgtcgcagccgtgaatctttccacgcatttccatatcatcttcctcaccagccataataattttaattaaactggaattacttgaagctgcaatgtcttctaataaacgctttttcatttcaatacctcaatagcattacgtaaaccatttgctttggcggttaaagccttaagaactttagtatgctcttcaatttgtttttcaacttcagtcaaacgggcattgagatattcacgttcttcacccagattatcaaccttttctactttaggctcttttacaactgtcttatatgtattagggttcttcagtttaattagaatgcgtgaactgtataacattgaaccattatcttcggtttcgtcatacatttccactacgtccataatttttaacatcatgcggagtttataagacaacgaacgaatagttttgttgtgcttattaatttctttagctgtcatggtgccgagattacgtgagtaataataaggaacctggatattaattaatactgatgaaccacctggcttgtgtgttacttcatcagcaataacccagtccttaacatgaactgtatttgtacgatcatcgcccgcggtaaacagtttgcgagcatgcttaaaaagcatattcacttgggtattgaattgacaagcaaatttatcagcaaatttagtttcaggaatggtagataaccaatcagccaaatgggtctttttaacatcgttaacaatagtaaattgaaccaaatcggttatagatgtctcagatttaatgaagctcggcttcataaagtttttaatgttatcgcgagctacagtagaagataacatacgagaacgtttaaaccattcaagtaaattgcctaacgaatgagaataagcgttctgagtatctttacagatatgattttcctggccaacatactgaaggaaatcacgaagaatattattgattactgccctgtgtcctatctgataattacgatgtttagtaataagactgtcaaaataatcaatataatgtttacgagttttcatgttcttctcacttgttaatgatttatactccgagccatccttggctttaaattacttaattaactgtaaagcttgttcaagacgatccaagcgattaacagattcttcccaaatctttttagccttctcatattctttctgcgctttattagaaatttctagaacttctttataagctttttctagtgcaacaacttctggacgaatttctaccggttcaagtgaatcgtcaagattatccattagttcctcaagggtagtttcttctttaggagtattcacaatttcttcgcatttttgttggtaaatttctttatcagttagtgaataagcacatttcacttcacgaagactaattacaattttatatccttcccaaccaccaatatttttgaaaggatatgtatgaatactttttacagtttccatacaatccaaagccgtctctaattgatgagttatagtgctagcaattgagaaaaatttattaatattcttttggttagcttctggtgtaaaaaattcataattcacaaaaatagctactttatttttatcaagctcatattcttttacgataatcatatcagaagccaaaggatgaatttgacgataatcgccataacataatttagaagctgattttagaatttgtcctttaaaaagtctgaaattactaatccaacgacgagtaaaaatattcttagggtcttctttgatattaagatgataagaattaacatcaccgaaccaattgtatcctattacacctttagttcgtttaatttctttcccaaaattaccaagaatatcccgattaactaaatatgaaagaagacgagaccctttaaagattatcttaatatcatctttatctacacggctagaaatttcacgaacttcatgaataaatttactggaagaaacaatacttgcatcaatactgctgagccattgattgataatagaaagaacagcattctgactagacatgggtttaactttatcatcaataaccctattgaatgatttgatatattcgttacgagtcatattaatctcctcagtagaaagtaagaacattataccacatccttgtggcaaagtaaactagttcagtgcatttaatgcattgttcagtttagaacgttgctttgtcagattttgaacccttgactgagcttgttctaacgccttttcagcttctagcacttcattggtcgctttaacgagttcatcatctactgccttgatagacttctcaatcgcatccgcgtgccatttttcaacaggtttaagactcggattttcaacaggaagaaaattcactttattgaatttccatgcatcattattacctgaactatacatccaaaatttaggatcgtttgataagtaattggataaatttaagttatcttgtacttcctgctttttctcttgcgggacttcgtcctttctcaaaaaatcgtatttaaatgaaacgatcatatcaagttcatatgatgttgtatctaacttaaatcgttcaaaacgaggtaaaatcttagactgaacagcggcaacaacatccatatacttaaatgcttctgtcaactgtgatttaaggcattcacaaattgaaagagaattttttgtattaggtttaaagctaattcgtgcagttctattattttcttttaatggtcttacttccatctgaagagtataaccatcaaatttcaggttctttaagttaatgtcagaaccttttaatcgactagctgtcgacaaaatttgctttaactgtttacggaatagagcaataaatctccattcaatacgataatgattgggattgaaaaatccagatgataaatcaaccttactctgaccaacaccttgaacaaatagaggatttttataatcaatagttttacagaaatcggtgagctgctcacgagcagtcatttgtgtaatatatcccgctttactaaaatgacgtaaccattcactgctattcatatacttaaagtgaatggaactattaactctatcagggtctaaattattttggcacaaaaatgtcataacatcacgagtatagctggcattacgaaccatatcttcaatttgagaacgagttttcatagtgttccttaagatttaagtaaatcaacaattttaattaacttttcacgctcagatttagctttactactcaatccagatagtctaaagatttcatcgtcatattgttgaatagaaatattcagctcttcaatttgcttattaaaataatcaatttgctcagaatgtttttcgttactacgaactggtacaggttttgtaggcaatttagttgaactggattcatccgggcgataaattaaaatacaacttgaaccaattggacattttgcaccagatgaatattctaatgttccagattcttttaaaacttcaaaagctaaacagagatgatgacccatattgacataatcagtagagcgagctctgatgtaataatcatctccacgagtactaaatttaaagcatttaaggtcttctgtattattggtcttaaaaatcatttgtttatctagacctttagctaatcgagcgcctaatgctaataatcgtcgttgattttcccacaaatctgcaatcatttggtcaaatgataattttggcattagtcgaccataaaggtcatatcctttattataattacgaagaatttcactcgcattaatacgagacaatgctccaattttattaagggctttcatgatgcgattagataaactcattccagatccgtttgttcgctgtaaatgtttttctaatccaaatccaatatcaactttaaatttatctaaaatttcagcatgaacatctctgtcaataacattcaaatccaaagttgggttaaatctatgaaaaaatttatctggctctccacgacgaagtacagtccattcattcaattttttattaactaaagatttaattactgtattgacattattaattactactgacatattttcctcactcaatttcaattttactaaatacacagaatatgatggaaaagactatataagcaccgcatacagattgaactaataccattccaaagaaccaaacgatattatcaaacaatgtctgttttacgtcgaaaggacgtaaacttacagtaatattatcacctttttctattgaagaatacatctctggggaaatatattcactaaatctataaccgtctttgagttcatatacggcaataaacgataaactagacccctttccttgagttcctgtaatggtattaactacagtaacatcataatctttataatgcatataatcattaatagcataataaccatatgcaattactatacataaacaacatatcaataaattcaatcttttaattatcaactgtttcataataatctcaattaaaagggcttagaaccattataccatccttggtataaagcggttatgcgagtaccgtctttaaccgttcttcaaacttccgaagagtattctggcgttcagctctttgctttttgtaagtttcaatacgctctgaaatgagagtgtatcgttcatttactgattctttcataaaatcaggaatttcacgagaagctttaatctcgtcaaatttatcaataacagcttgctcttcagcaattaagttatcatacatcaaaatatctttcttgatgaactcaatatcttcttgagttacacgagataatttagatgctttatcctttttgtactgttcgttagtatcacgagaccagtgtaatgtacgatttttattcgtgttcttgtaaatttctataataccaatctcatcgataataacgatccaattccaacgggatttgtaaatttgtcctccatcaacagtgatttcaccaccgattgagacatcattaaagaacttgctttgagcttcagatttaaatttaccatcgttataatttaccaggttgaaaatatctttagcgttcatttttgttcctccgtagttgatagttgcatagtaccacagaggaacggtcttgtaaacaactaaaagaaacttctttcacaattttttccactgaaccaagcgctcaccgctttcttagtctcaggagcagtgttatccataaaccattcaaaggcagcctttttatgattctggagggcttctcgggctttaatctgctcacggtctattaacactaacatatgagcctttcttgtcaccaagggcttcttatgattttttgaatactcccaatcatttgtccaacgcattgtcgttgcgaactgatgaaccgcgtctttaattttagtttcgtaaatttcacgagcctttgagtataacatcattacctccatttaccagtttaattctagtcatctttttgatggcagtccatataatctatttctgaactgccttttatcttagaaggcctcttatgaattatttcagaagagtaacctcagcgatttcttcccaaccgtttttgtcggtcataataaagtcagcaagataaagtgcagtacgcagtgaaacattgcgtaaacgattaacattgactttcatccatgataatgctttataagtttcttcatcagaaagaccgcgtttttgcatcatgtcagttgaaagaataacatcttcaaccctgaccataatttcttcattagtgtgaacacccaaatccaaataaactgagcgggaaactaatgcttgtaaatgcggagcaagtttagtaccacggtctaattcgcggtcaatgtcaacgtttgtgataaaaacaatcgttcctttaaattcaaactcacgctcaatgcctttttcttctaagtaagaagatgcggtgctccagcagactttacgggtctctccggtgtccagagcagctttcagaagattaagaatgtccatatcagagaaaacatccacatcatcaatcaaaaggacagaattctcttcacgattattccaaagctgttcataaagaccaataccagagattttaccattaatgcttttatattcaatgtatccaatatcatttgctttatttaaagctttatctaaagaatacgttttaccaataccagccgcaccagagataattaatgaacgaatgtttccgttaataataccattcgtcatcattcccataacattaaatcttttattaatgcgggttttcatatcttcatacgattctttaacttcttcaacttttacaccatcatatgaaatgtctgatttataaacccaaacaccgcgacgtttaccgtcaatttcaacaaaaactttaccatctccttgtgcatctaccggagcattatctgggaaccattcgcctaagagctcaaaagttccagagatttctttaccgaagtagatacccttattgatagttacagttttcattttattctccaaatccgtatcagttgatagttgtatagtaccataaagctttatgattgtaaacaattttgtgaaaaaatttttgaaataaaaaagggagcccgaaggctccctatcatttataataacttcggtggttttcaagataaaccttctcaaggaagtcatcccagaaacccatgtctactttttgctgcataccgttcttagaagcttcagtagatgctgcttctacttgatcgaccacatcttccaaaaactcttgaactgttttaaatggatgtttacccaacttcacgtcgagaataaatggagcatcttgaagtggataaaccaagtcaccagttttgtaaatttccaatagttgaagtccaccacggcaagcatggctcagagctttccagtcaataccttcattggcttcggccttacgagcacgttcaccatattcagcatctaatttgttcagtgactgcttaagctcaataagagaaagcgttgtctgatatttacgacccaatacagtgtagaacgtttgtggacctgttttctcatgattatggaacacccattcacagaattcgttttttggaagacgatgcttaatatcttcaactttagtgcgacgctgcttaatggaaccgtcttcttggtaatcaacccactgatcggggatttgattaacgactttcaatacatcgcgtaatgcagccaaacgagaacctttaacaccatatttagaggcttgtttacgaacatatcctaaataagatttcatgttcgtcgtataaaaacgagaacggttgtcttgaataaacttccacacatcaggcaaatcagatttaaccactagttcaggtggagtgtgaagcatatccaatgctacagtttcaccatctgctgctaatttaaagaaatacttaagactatacaattcatggtcaatatcatctttagtgtttttagatgatgtgttgttggtatttttactcatatgctctttaacatttccgataagaatatcacgagcaggaggaacaaaaatttctttaaaatctacatcagattctggagtagaagttccataaagatgactaccaaaatagcttttcattactgttttcatcattcagccttatattcaataacaggacatactttagctttacgagcttttaaaaattcaacgataatcgatttcttggattgaataggaggtaaacctttatacgccctatcaatattttctacgtgtaaagcataatcctttttccatttataatctttatatttttcacgcaaatgtgcaggaataacaaatgaaccgataataagtaaaacaaccaaaagcgcaagtataaatgatgatggaagcaaagtccataaactgccaaaaataaaccaacgctgtaggctttctgcacaaataattgttagtcctacgagtatagcacatccaaaaatagaaacgaaaaatgtaggaataacaatagaccaaaaatacgcgcatagtgtcttaggtcgttgccattcatcgttaaacaatttgaataatttatagtgccaagagttttcattaataatcataattatcctttcattgaaggcgtaacggttgttaaatacttaatcatagcttcagcttctgattttgataatgaaatttcttcattgttttgacgaatagaaataaaatccggatgacggtcaccaccagcttttaaaacacacatataagtatcaacttcgccttcaatatttgaaatgattgaagcagttccgcatgaatgtggtttttgataaatcaatacagcttttcttccaccgtttgactgttcataggcttttaatacatcaagcaaatcagttcttttatcaatagctaaaatgttattttcatcttcaatgttaaatccttcggatacttcataaagtgttacccataaatcaccgatgtcaataacagcatttacttttccacgactttcaagagtatgacaaattttcttgatttcgtcataactcattttaataatatcatctccttgactaaggaagatgtcatttttaaattcaacacgaattaaaccgcttccacttgaaataaacatatttcctcactttgaaatcatagttggaataacagaatcaagataagtctttagtgcaatagcttcgtctttggtaaatgtgacaatatgtgatcgaaaatcgtcaatttgacgaatagatactatatctccctcttcatagcattttgaaacatttaaaatagtttcatcattctgattacaggagttagtaataatagcattacattttttaaaccattttaaattatgttttcttttagtagaatcataaaaatatttaatgttagttataaaattatcccaattattaattgataagcacattgactcgcttttaatattaaatcctggacatgaagaataaaaatgaattttatgctcatcattaatgcttacaattttatcagtgtaagcatattcaatttgggttaaacgaacaatttcactaggcgtaaaatataacatatcatcttcttgcgtcaaacgatacatgttatttactttttcgatcgctaattcaccaaaaagcacactatcttctaatactaatcgtttcatattaatcctttttattggcacgaatttgttctaaaattttagagtattcctttgtatcagatttacgtacaatcgatacactatacggcatactatcggtgtcttttataaagcgttccaaatgacactctaataaaatttctggattataaatcgtgtacatcaaattacctgttgctccacgatattgacagatttctactgattgaacatcattccataattttgttaagaccaaatcacctacttctaatttaggaaagcccatgttattcaccaattaaagtttcaatataagaatcaagatttactttagcttcttccataagagttttgtatttaatcttgttggcatgtccggagaaagctgattcatcaataattgttgatgtatgaacagctttactatacgtctcaattaattctcttaatttaaaagcctgctcacttgtcattacatactcctttgaataatatcaataatgttgttcaccaaattataagtaaacattgggtaattatattgaatcatcacatacacaacaaacaaaactttcattctcttctacttgacagttggcaagattactataccataaccttgccaacttgtaaaccattaaatgacgttttcgataaaattctgaagctttgtatgagcatcaaccatgattttcaattcttctttagcgaaagctgtgcctctttcacgagaagagcattcatagtcagaaactgcattagcatattcttcaattagtttcattaaaaacatctgcttttcagttttcattattccacctaatcatttcaagatattgaactaacttagctttagatttatccaaatcctttttagctgtttctataccgtcgtatgaatatccttcacaatgctcaactgctaattgatatgaatctatttcaatatcacgtgctaatttaatgattttttcaaactgttcatgtgttagcatacttaaactctcgtattatgatcgataatttcatcaagaaacatatctaacgcttctaaagcattatcaactttagtttcaaagtctttaatgcctttattcgaaatacccgatgaataccaagcaaagtcaatcagctcttcatctgctttacgaattgaagccactaattccttgattttatctgcttgctctatactaatcattattccaccacatatgacagagagaatattgcacacgccatgtgagttgcaacttcatcacacatattataacgtttcttaagaagttctacaagttcttcactagtaacttcatccatgtcgacgaaaaaatcaccattaatgatgacgtagatatttccttcttgattaagtgcttcaattttcatgatgttctcctctttatccgatagttgtatagtatcacagctcaaacggaaagtaaaccggtaaaatgaaaaaagtctcccgaaggagactaatgttattcgagggaaagaagatacttactctggtaaaacattccagtaatatcatctatcgtgctttgaatggctggaggcatttctttataaatgctgttagattggtctagtatgcgatcaatcattttaattgtgtcggtaggaagtttactggcatctggaattgaaggcgtgtattttctaccagaataccccaaatattgctcaccaaatttatcaatcaaatctggcaattcggagaaaataaaatcgtatgctttgtgtctagcataacttttagtttcaaaatgcgcagaatgaaaataagcttgtgcagccattaataaacctaagtattcatctgcctttgaaggttttccactttgtgaaaagtcgctgaatttcattcagtctccaatttaatgttcataattctagcgtatgattgtgccatctccgcgcctcgttctatacattcaaaatcagaagagcacgggtcatttttataggtcgttctcataaaactatagaactgttcagatgattctacgcttttattttcaaaaagcatataaacatgtctaataccagattccataaatttatcaaaatgaggatcggcattcgcttcaattggtggagataaagcaaatgacaatcctagcatggcaaatagtgccgttgcttttaaggccataaaggcctcctatcatttttgtcctgtatttactttatgccgatgcacggccttaactttatcaaggtatttttcaaaatttcgcaatctagtatagtctgccggagattggttgagtgatacttctcgacgcaaagctgaaatgatatttccaacttccctacgaatttcatctaattgaagcacagtaagattgcgaagttgcttttcagttaattgtagcatatatacccctttagttagataaacctatttataacttttgcactaaccgagctttttagttaattcgttccagtgttttctacacaaagaaacataaatttcatcaccaatacagatttgattaccttctttaactggtgttccatcttccattaatcgagctgtcataatcgcttttttgccgcaatgacaaactgcctttagttcaataagtttatctgcaatcgccaaaagttctttagaaccttcaaacaattttccagcgaaatcagtccttaatccataagccataacaggaacattatatgtatcaacaattcggcttaattggtgcacctgttcagtttttaaaaactgagcttcatctacaaatacgcaatgaatatctttttgtgcttcagcccatttatagaactcgaaaatatccatatcatctgtaataatattcgcttcctgtttaattccaatgcgagaaacaacttcacagacagaatcgcgagtatcaatagcaggcttaagaactaatacactcattccacgttctttataattatgtgcagcagtcaaaagagaagcagattttccagcattcattgctgcataagtaaaaattaaactcgccatatcaccttcttaaagcgtattcacataagctattaattcattttctttcttatcaaaccgatcagcaaattcttcctgctgttcgggagatagcgggccgtattcatcataaaaggtgtttgcttctgtatgctcatctagaagttcatggataagctcaaacaatttatcttttttgttctttactcagactcatatattaatttccagaagttttaaaataattcgcttttgcttaaatatttccatagttaaatgaccagtatctttttgaccgattccaatagcaaaacctttattaacagcgagttcaattaaattatcaagctcacgtaacacttcgtattgtaactcaaaactattcattttggtttaccttctttaacgaaatctggataaggataaaatcccgaataaaatccttcacctttatgattgatacatcctttattagaacaatagcaccaataatcgaaatcacaagccatttcatcattacataaagcaaaaacaaccggccatttacacttttcacaatgagcatttttaagaatactagtttggctcataaccatgtcacctttaagcaatattcttctacgtgctgtttacgacctttcttatcaataaaggtatattcaacgaatgttccaatgtagtctttatctacatcatgtggactattaattggacatttagtacggcaaatgcgttcccattgacgaataattactgctttgtttttaggatcaaacggatgcgggtaatgtactttcataatccaccactattaaatcaatatcaggagtaaacatgtcgattaatttagaaaccttatcccaatcaccgccagcaataccacaacctatgcgtggaatgtaaattactggtttaaacaaaagggtttctgcctgtagatttaattctatcatgcagtttactaaagcaccataatcaagattaggacccggttcgtattgcgtatacaggttatagcatataccaaatcccgtaggactatgtttaaaaacaatagacatatcgcctaatttatcacgagaaccgtactcggtagtagttttatctatttctaaaattttgggataggctcttgctaattgacctgctacgccagagcccattgtatgaaaacagttgcacccgtgtgcaataatattaccttgaagaaatagggcgacaatatcgcccttgatatattttacaatcatctagtactcaatcctcgattataagaatctaccaaacggtcaaccattgaatgacaagcggctttatctttctcctccgcaactgaacattctaaggtattccactttttagcatatcgttttaacaatgtatcatttttatatctgcttgatttatctctttctccgtctttatatgcatatattaatttctgcgcaaattcagcttggcatgctttatttttcccacaataatccgcggcagtacggtttacatactctctaatttcagtatatgatgtatctgctaacgcagaaaatgaaattaatcctatacataaaaccaaaattttagtcatttactatttccaaaagtttattatttttaaggtaattagccttttctaggacttcagaagcatatttagaacctgctttaacattccatcccgaattataagaggatattgcttttcttatatcgcccttatgtatatttaaccaataagaaagttcaatgtacgcccaggaagctgaattggaccgtttattcaacattctttttatttcagcatcggtcatattataaccaagttccttaactcttgctcgcatagtaggcaaataattttggaacattccgtaggcgtgatgctttggtttagattttaaattaactccgccagagctttcttgccataaaatagcagccattatatgacctaatccgctcttgtggatatttttatgtgttttatattttccatccttagaaaattgttccccgaattgatacgcgtaacgcatgttatcgagttggacattactgaaagtatgctcggagctatgtgccatcatagaaatggccaatagaccagcgagtagtgcttttctcatgcttacctcattgagttttaattactgctttagaagcctttcctggtaaacgacgactgttgataattgccatcctgcactgaagtgacgggtctttgaacttctcgttaggtttacaaactgtaaatccaagccaaagatttccatctgtgatttctaaacgcccaggacgatattcaaccccatcaataaaatcctcatcaatatcagggcgtggaggcatactcaggaattcattaacttctaaaacatggtcttttattttatggaataattcaaaaacatatgtctcatcaatctcccgttgaattgcacgatcaagaagatgctgagaatattttagatgaaacgatgagacccctgctgcttttgatgcctcacgaatctcattgttaatttgacgaaactccgactcaaagtgacgacggagcttatttcgacggataaaaacttctgtattgatagtcatgttattctcctcttaactgatagaaaaattataccacagtcaaaaggaaaagtaaacagttattctttaaatctaatcaatttattcatagactttgaaacttctgcacgaacctcatgtaggtttttaagctgttcaagacgctgctcatagtaagcaatttcatcttcttcgagacagtcctgtgaatcttctttaagataacgtgcatagtcctgaaaagctttacggactacttcctggaagtcatcaagactttgaattttcttaggagcggcagatacacgacgaggtgcagtataatactcataaccaaaccctgcacttaattgagccattagtatttttcctctggttggaacactgcacgacaagcccacatactggcttctttgagtttcgttttagcaatagttaactgatcgaggctttcagcataattcttcgcgagttcatcatcttcacagctatcaaatgcttcccaaaattcatcgtataaagcatcaaagataagtcctaaacgaacttcagcgtctttaatagcattcactttacctattttctcttcagtatgtggtttataacccttaatatcttcaatcatatttgacttcctcaccagtacataaatcatattcaactaaacgaataggttcatgaatgccatatccctgaacagaaatttctgtcgtaggataaattccactaatatcacccatgttccacgcttcattaaattgctgttcgcctgaattactaaaccattctgcgaaagcatttagcacatctttagaaccttcaataattatctttgccattacagactctcagtaaaggtacgagcgataacgtcgcgctgctgttccggagtcagagagttaaaacgaactgcataacctgatacacggatggtcagctgcggatatttttccggatgcttaactgcatcttccaaagtttcacgacgcagaacgttaacgttcaggtgttgaccaccttcaattttaactgtaggctgtggctcaatttcaatttcacgggcatgcaaaccgtagaaaatttctgggtctacaaaagagtcctctttaaaggttttagagacaataattcgtgcttgaataccatcttcaaaataaatagtacctttatgtgtgccttcaagaatttgatatgctttcatataaacctcaattagaaaataaatttatccaagattgttctttaattaaaaatggctcagaatcatatgccattaaactttgggtgattagtcctttaaaaggtccatcaataaattccatggtaaaatatggaattttattcattagccgtgcattaggagcagtgcacaaaactctgcatcctttgaatacgcctttttgtaatttgtattgcttgggataaaattcgctcaaaatgttattatttgccaaaatttcaaaatgattcaccaatttatttttaatagtttttggcgaaaaataaagatattcgaaaagctgtgtgtctgtcatcattgcattccaatcacaaaaaattgaggacgaactgtttcacctgtttcagcattatagcttcgacaacagtgttgtaccgttttaatatggatattgtaaatcttatccatatcaggagctttaataggttcgtcaattatgtacaagatacgagaaagcgataacccacggaatttatgaccttcattaccgataaaactacggacagaatcagtaaataaacgaaaacgtatatcatcattagaataacgcgaaaattcctttttaatgttatttgcagaaattttagcgtaagctgaagtattagaaagaacaataactgttccgccatcatacagccaattagcagcaaagttagtcacagcaattgatttaccggattgacgtccaccatctatacgaagtgtgcagtactgtttgagcacatcttccattggtggaagataatcattcttacaaatttcttctactctagcatcagaatggtgtgtaaaagcattcatcagggatagataaggaccagttaaaaatgttctcattttattctctctaagtttgggccattccgtggcgcatgaattgtccatttctgtatttacccattaccgcacttgggctcgaccttatcacaggttggcgggaatccctcacagaatcatgaggtccaggttgttcccatattatttgaacgatttaacgtactgaatagaacccttactattcacaaaggcaattttaccatttttattatacatggtagcagtacgctgataaccataggtttgtttaccagattgataaccaactaatgcaaaattatcttcacccattttattctgtttagcgcgaatgcgttcatgaccatgtgccataagaaccttagcatcaccagttgcaatggatcgacgagttttttcatcttcaactgcattaacaaagtcgtcaaatgaatcaaatttagcatgagatttattatacaattttccatctactgcataattatatccctgtacatccatctcaacttctgtaccatcatccaatacagcagtaattttttgaccttttttaaatttcaaaagatcagtaaaagattcagcaataatttgagaattaatagctgcttcagtgataaattcttgatatgttttcatgggtttcctttaaatgtaaatatttttaccgtaatacttataccaatgtggtttcattaaaattttttcatcaagtcgttgttgactcaatttaatagctgatttgcatggattataatcatttttccattctattggaatatcgctgatgtcaggaacttcagtatcttttatactgaacccgcgttttaagcattccgttataatgtctaattgacgctttcgcaaaaattctaacttatcgtaaaagaacgtaacatgaccagaacctaaaataaactcggaagatattttaaaatctttaacgcgcttaccgtttgccacatgcttacgaactataccaaaaacacgcggcaattcacggtattctgcgattaaatgttgatcagcaagttcagatactaaagtcaaattaatacgagtcattttatccctccaagtaactgtgaatatactatcacaattctaggagaaagtaaacaactttatagatttttatacgcgtcccaagtgccagttctaaacgtagcgataactcgttttgcgcggttaggcgtttgattataccatctacttttagctaagttaactgctgcttcatcccagcgtttttgttgaagcatacgtaaagaattagtaaatcctgccacgccggtttctcccatttggaaaaccatattaatcaatgcacagcgacgaacagcatcaagagaatcataaactggttttaatttagcatttctcaaaattccacgaacagcagcatcaacatcctgattaaagagtttttcagcctcatcttttgtaattacaccattgcaattacgcccaatagctttatctaattcagatttagcaacattaagtgatggacttttagtaagcaaatgaccaatgccaatagtgtaatagccttctgtgtctttatagattttaagtctaagaccttcatctatacgtaacatttcaaatatattcataatacctcctaagtgtttatagaaggtatttataaaattaaaagaggttgttcattattcggtaaagtgaaggacccatcacatattgccactgagtacgaggaataagagcaaaagcatccatctctggaatcataacgccatctttattttcaaaataagactcgcaatggcaatttctgaacatctcatgctctactggaatcgtataataaaataactgtaagtctttattactagaatatttaaatatacctaggtcttctagaaggtctggattataattgctaaaaccggtctcttctaagcattctctttttgcagcttccagtgcattcaaatcagaactttctacacgcccctttggaatatcccagcgatgtgccatcattccaggcttacgagaaccagtaacccgacccataaataaatctttatcttctgtcataaagataatgccagctgatagtgttttcattttaatttcctgcattcagtgataaagttatttaaattttgagtatatttcttttcatcaaaaatcttttgttgtctgcgtagccgccatggcatttcaatgaacgtataccatattccagataatattgctgcagtaaaaatattaacaagtatggttaaaagaatccaatctcctattctgtccattggattttttataaaaaagtaaaatacgaatgatgtcacaggaagactaataatataccacagaatcataattttatctgtgaaccaatcagcgttcgttaacttagcgcgaccattatgaatacacacgaatttatcatctgttataatagatggcttagctgcttgatatcccattctaaactccctaatcaacaaatttttcatatcttcggaacaaccattccagtcaactctatcaactgaaatgccatcatccccatcatctaaatcataccagcgagtttttaaaatcatttaattttcctacaatcactcgcaaactcttccattgattctttttcaatataagacatgtagctattatattcctttaattgtattttgtaatccttttttctttgccaatttattttaaaattatcataatgaaaatataacattgtaccaaagaatgaaaataatgaaatcgctatagtataatgaagttcactccaaacttctattatatctattataccgctgacgttactacggatgtttaaaataagacagtcaattaacaatccaaaaagactacccgcaagagctgcagccaacgctacagcaaaaattaaaaatgactcaggaagagaatatttgactttatttagttttggcttttgcatcgtgattccttaacaaatttcataatttcatcaaattcatgcgcagcaagtttaagctgatgttcctttttaatctttttacactgagctttccaatcacgtacacgtttacgatagtgtcttccttgataccaatatcctatccaatttataggtactaataaaagcggaactaccaacggaagaattagtgttgctccaaatattgcaccagattcaatatcagtcataacgtctataaccattccagcaatcaccagaatcacaaatgatacaactaccacaggacctattaacacatcagtagaaattatctgacgctttaattcatacttcaacggtttacttggaaggtatagtgatggttttgacatattctctacattccttaacaaatttttctaataataaatcgctttcaaaattgggattttctacgaatttatcaaaaagatcatcgacaatagttaagatattctttttactaagaatacgtttattttcatattttgtttcagaatcaactataagagtaaagaaatatttcttgccctgaaattttacagtagtatcaatatagaataaatttgacttttgtaaattacgtttaaaccatgcatcacttaaactataaacgccaagataatcataatcgtcgtttaaataacagaccgtccattcaggagaaacaaaatcagtaaattcaacgtcaaaatcgcatgttaataaatgaattgattcaatactgttaataagtattccaggacgtattaaagactttttacctctagaaaatcttccagaaagattttcaacagtttcatatgaagaaccccaataataattacgtccttctgccatacgtttaagagcatttaataattggtctggaacatcaacctgtctttggaactcttcaaacattgaattgaaatcactttgcattttcattcctacttactccaagtaataggggccgaagccccttatcattatttcagagaattaatatattcctgaacatcggcagaggtagtttcaaccccagaaatattaccattaaaggtttcaactcgagcaagagtatcttcaatatcaaccttagtcagtgctgcaatttcaactacatcatcagcagtactaattccaagggcattcgcggcgcgagtttcacggatatattccaatttaactgcaagttcttggcgagcatcatctaactcaactactttcttggcgatttcaattcgcatttcagcataaccatcagctttagtagtcaactgctcagctgttcgacgatatagtaaaccaagtttagcatgcattgttacatcttgaccttcagaaaggagcttgcgaatttcgcgctcttttgattcggcctgcttattcttttcgacaataagttcacgaatacgcttttcttcattaatagatttaacagaagcagtttttagatctttaattttatcaagcaattttgctgctgcggcagtatactgctcttcaacagatagatttttagccatagcagaaccaagtttagtgcgaataaactcaacaattttcttcagtgtgttcatagtatttccttaggttgattagaaattaaaatctgcagaagaattatatcatgctacttaagagatgtaaactatttttaattttacaaattcgttcagcttcttcaacagcggcagtgataatgcttttagctataggagtactaatactagtagcttttacacttaacacgatttctttatctttaccaggccaaccccacgatttttcaccatgggtgcctttaattacagcagacacctcaagtgagcatccattatcgcatgtttttacattaacaacccaagtgtcacttttctcaaccggtttatcccagtaaatattaagaatacgtggaacatcaaatttagcagggcaaatcttaaccgtaagaccttcgctttctagccaattaataagagggcgttcatacatgcggcgatgtgggctttgaactcgacaagctttgtacccattgcttgcggcttcactaagctcttctaatacctgcttttgcattattgataagataccatcaaaagatttttcggaagtttcattcagttcggtataaagagacataacagttttcctcaaattataggctcataatatctcaatcatgagcctatgtaaacttatttcatattattgaaatattcttctgcgatttcgtcgttatcatggtaaactttagaagacagtttaacataaccttcagcagtgaacatgttaatcacaacctttacagtataccactgaccatcttcattacccattactgcgtaagtttcaaacatcggatgatcaggaccgataactttaatatcattcaccgtacgaccgaaatcttctgaaacacatttcataaagaagttgaacagttcaccgtaattatccatttcattctccaagttgttttctgtatcagtagttgatagttgtatagtaccatagaagaacagggatgtaaacagttttgtgaaaaattttaaaaagttttggggaattctagggcaaggaggggaaatcaaaggataggataatatattataaagggtagaaactaaatgatgcctagagaggcctggaaaggcctagataccaaaaagccccaaccttttggtcgggactaagaatgttatttgatttgtttagcagaccaaatgcggtctttaataattttttggatgtcttcaacatactcaagagaatgagcatgtgggttatctttaaagctatgagcacgagctagcttttggccttcagttttgattactaaaagctctttaaggatagcttcatatttggagataattcctttaacgatatttttttcttgtgcgactttaggatctgctttaggagcaggtttacccgaagcctttgcaaaagcagcgccagtagcaactaaacttttccaggccatactaactgcatttcccgtaaatccttccgctttcatgtcgcgtgcgaactgaaatcgcgattcatcagaagcatctttgtaagaatatttacccgctgcaatggctgcttttgcgacagcttgaatttcggtgctagatgcttcatttaacaccgcttcatttaaaaattgagtatatgatttcatcttatttcctgttttaattcgtggatttaatatacttatttatactaaaaagccccaacctttcggtcggggctaagccttgcggcaaccttgtcggggttccacctgctaaggcaagtgtttgtacgaaacgccgggattcgaacccggttattaagcagttgacgctactcaatatttttaaaaggccatatctcgaccatatccgaacgttccgtcaaaaacgctactcggtttacggcaaagatatttcctcgaatcgataattcggtgcgccgtttctgctgtgatagtaaagagccagaacacagtaaaactgtgggaggaaactatactccagggaacatcagtccgacgacttaccggtagcgacccggtttcttagtattcttttaaagcatcaacctgttcacgacgtttacgccataaatcaattacttcatacgcagattcagcatttcgaattggacggcatttatataaagacttgtgattttgatattgtgtagataacggaattttatctaaaaggtctttacgttcaaaatattcgtaaccatctaaaccaaatgaacgatttttgagaaattgccaatgaccaaattcgttttcgacataaacataatctgcatgctgataaagcaaattaattacacgttcagaaataacagtatcattatgattaaaatagaatgttaaatcatgaactactaaataaacattacctttcatattttcctcacttataattggtcgaggcagtagggatcgaacctacgacccaggacttagaaggtccttgctcttccttctgagctatgccccgtaattggggtgaccgatgggagtcgaacccatgactacgagaatcacaatctcgagttctaccaactgaactacggccacattaatacctactccaacaatcatgatgtcttcacacgaaattaagagaagagtgatcagttcaacccctataatcacgtcaagtagatattaatgtgacagttgtcacaaatttggcggacgtgataggattcgaacctataaccaatcgcttaacaggcgatcgctctgccattgagctacacatccaaattggtggggagtgatggagtcgaaccacccgagtcgcaatgacaatgaatttacagtccacaccgctacctctacgggataactccccttaatttggtggccctgggtggaattgaaccaccatctggcgattatgagtcgcttgcttgaaccttccagctacagggccttggtgctgattgacggaatcgaaccgccgaccttctcattacaagtgagttgctctacctactgagctaaatcagcaaaactggcggaggcgataggatttgaacctatgagtcgccggagcgactgccggttttcaagaccggtgcattaaaccactctgccacgcctccagtctccatacaaggatttgaaccttggacctcctgatcccaaatcaggcgctctaccaaactgagctacacggagtaaattaaattggagcggataatgagaatcgaactcacatcatcagattggaagtctgaggtaatgccattatacgatatccgcaaatttggtgcgagaagtgggactcgaacccacaaggaaatcattccgcagcattttaagtgctgtgcctttaccaatttgaccattctcgcgctgggaataaaggacttgaacctttgcatcctggaatcaaaatccagtgccttaccaacttggctaattcccaattattaacaaaggctctcaaacaagaacccttgatgatagagggtattaatcagtgtggtatgagttaataataacaaataattcttaaagcatatttaccatttatgataatacatatttacgatgcattcaaggcccaaaggattcctgaaaatatcatattcaagaggacctttttctgtttcaataaagaaatcaaaatttactgtattaaatttacggtcttccttcactaatttaacttgagaagatgaacggtcaacataaaccttttcaacttcaaaacatgttaaaatgccataatcatcaatcaaggctttagccgcgtcttgatcatatttatatccattttcaatggacgatactttcgcataaagaatcattatcaaccttcatcaacaatagtatgcgtattggcatttacaatttgccaccaatcaaagcgattagaaccataatctggtttgttttcattttctttgataatgtcacggagttcatcttcagtggcggctttcgcgattaaatcagcatatccaccacgaggataataattatcacctgcaaaaagtaaaaagtttggtttaatgttattgaactcttcaagagtaataacttttcctgacggttgaacaatctctacatatttatatcccaatttttgagcagcatctactgcttcaaacaaagtatcatgagcccatccaatttgacaacctggcttttcagatggattagcctgataatccgcatacactttatacattctattcacctttagaaattttatccataacgatagcgattaaaccaattaaaaatgctactacaagtgaaaaaacgttttctgctgtagtcaataatccgcatataaatccaacaaacattgaaaaactaaaagcagaagcagaaattgcaatagcaacatttcgaattaattcacaacgtttcattttattctcctcagtagttgatagggtaatagtatcacaactaaaaccctatgtaaacaactttgtgaaattattttaaatcttctaatcgtttcttcatcttagaaccatttttagcaatttctcctgcatcggagcataacgctaaaagtgctttaactttagtttggtctcctttaaaagacgaaggatcgaccgcagcagcaagttctttaatacgagagaaaagacgctcagcttcagctaaagccattccaagctttacttccataccgtgagaagattcagtgatagcagtttttgtagcaaactctttgaaagttttcattttattttcctaattaattttgatgagataatagtatcactacctcatcagtatgtaaacaactttgtgaaattattttaaatcatctgcccaatcaagtttaagaggctctttatattcacgatctaatacgaccggaatttgtacatcaccgctaaatgataagggtccaacattataagacaatgttatatgcggtgtgtaatcatcaaaatcatgtgtagcacctagtgcccgcgcatacatgtgtctacagcgcagatattcagaatctagcacaagtacaagagtcgatccatcttgtgttttccatacttctaaatgtccagaagaagctacttcaaaacttccgcttgatggaacatatggaacatttactcttgaataacatatggtcgaatgaattttttctctaggaactggattaggaacacgtaaagagcgctggagttcttccagcgcatcaagtgttaattctgaaaacttagctgctacataaagacccgttgaaaagtctttaaattccattattcttcatcttttgcttcatctgcagattcagcagtaagattcttgacagcttcaacgatttcttcaactttaatagtatcgccagtgatacctactgcacgagcaatttcagccaaagttccttgcagaattttggattcttccatcagacgagccgcttggtcctgcgtatcaagaatgcgagatttcagagttacgatttcagcagacagtttttgttcaatagtttgttcagacattatagtacctttagtgtatttttaattttagaaaaaagttcttcaagagaaccatcgtttgtaattactaaatcgccatcacgaattggcaatccagcttctgtaatatgtgtatcattggatttttgaccaggacgaactacatgaattactgtagcacccatcgccctagccgcatccatttcatggtcttgacgggtatcaggaacgatataataatcataacctgagttaaatttatcaagataatctaaagcaaataattttacccagtacatgcggtcgaagttattaacaatcaaatccgtacctagggcttgcatcagacgacggactgaccattgatcttcaatattatttataacgtcaataatcttgttaaatgctacggaattaactgattcttgtccttcgtcatcaaaaacaaacacacccttaattgggcttttaccattaagatagcaaaatgcttgttccataatcgtgattacttctaatttagtcagatttaaattagtctcacgatcatagtcaattccttcaaactctttacgagttaagcaaggatagtcggtgtttgctgcaaatactccccatgcataagccaatgcatccttaataggaccagcaagttggtatttaaccgcagaataattgctcatgataaaatcagcagtagtatcttttccactacgctttacaccgcttaaaaagattagtttcatgtgtttctcctcaaatttaattaagattataacacacaaaactgaagcattaaacttctgctataatttttccatctttttctacttgaaaataggtgtaaggaatcgttgcagtacatactaaggccgggtctgaatcttctgtgtagctaaattctacttcagataggtcagaaacccacggcttataaaaatttattgacatcacgatttcagttttgctattatctaagatgtaaagagtaatgtactcaggacctgttttttgggcagtattttcacctgtaagatagttgctagttcctaacatccattcatacattcctatccacgacttaagttcttcatcaactataaatctcacaatgagtggatcatactcaaatgtaactcctggacgttgtgctctgcctagtccaaacggcccagtcacggtatcagtaacaggtattctaattcctggaataggaactgactgagcatttaaagtaaaagcagatgtagtattactatgtggtattgatactacaaagttagttgtatttgcttggttaaaaatttgttgcagagtttgcgacatatattcctcataatgctttataactgttggtggtataatgggtctaagtcccttccattcaattccatttagaacaaacaatagaaaagaatggaagataatagaattagatatttgaccagactttgtttgcagagaaacgttttccttttgaaacgaactgctgaagtggcatcaacacaacgttcgcccagtctttcggggcgatttcaacaaggctacccataatattaccgggtatatatgccttaatcatttggtctgcacccctaaatcctttcacttgactccaatcaatttttaatttcgttttattagtaatagtaggtgtatttgcatattgctttaaaagctcttctagaaattgctgacgagctttaggtggaatatagtgcaagtttaatccatacattaaattatgcttacctaaaccaaggtaaattattaaaggaaatttatcccagtaaggaagagtttccttgtgtttagcatcataagcaaaagcatatattcgtcccggctgcgggcgaacaactttatgtccttttacttgcttaatagtttcagcaaaccattttctggttttattattaattgctgcaccttcattacgaattttatcgcgcaatgtttgtctgaatgaatttatcataagcagttgtctttcttgcttattgagcttattcattgcttttgattcaagcttttgaatcttttcagctgttttaattcctgaagcatattttgacattgctgaagtaaacgtggagtatttgattcctctttcttcagcaaattgttttcctgtcattccttttgctttggcctttttatattcaagacctatttgaatccatttcttttcgtttaatgattgcttaacctttggaacttggggagtgctttcattaattatttgaaaaatagccattatgcccccttaaagccaagagctcgtaatccatcttctgttagaattctaaattttattccacgcttttcagctaaagattgcgctgctttccatttgtcagtgttcacagaccaggtataaatttcattcataaatcttttcttcgctgcagttgttagatgtgctggtttaactggtggttgtgtttcttttttaggttttatttcaataaaaaattcttgtccagaagaatctttcatccaaatatccatgaagtatctacgttttttcccttctgcattacaaaaataaggaattactgctgtttcactaccccatgcaataatttctggatttttatctaaccattcaaaaaagaatttttcccaatttgatctatacgtaatttttttagggtcacctctatattttgatatatttttaggaacccattttccagaatatgccattggattctccttataaatagataatatatttataaacaggagggcccatgctctttacattttttgatccgattgaatatgcggccaaaacggtgaataaaaacgcgccgactattcctatgacagatatttttagaaactataaagactattttaaacgcgctcttgcgggataccgcttacgtacttattatatcaaaggttcaccacgcccggaagaattagcaaatactatatatggaaatccacagttgtattgggttttattgatgtgtaatgataattatgatccatattatggatggattacttcacaagaagctgcttatcaagcatctatacaaaaatacaaaaacgtaggtggagaccaaatagtatatcacgtgaatgagaatggtgaaaaattttataatttaatatcatacgatgataatccatatgtttggtatgacaaaggtgataaagctagaaaatatcctcaatatgaaggagcacttgctgctgttaatacgtatgaagctgctgttcttgaaaatgaaaaacttcgtcaaataaaaataatagcaaaatcagacatcaattcatttatgaacgaccttatacgtataatggagaaatcttatggaaatgataagtaataaccttaattggtttgttggtgttgttgaagatagaatggacccattaaaattaggtcgtgttcgtgttcgtgtggttggtctgcatccaccacaaagagcacaaggtgatgtaatgggtattccaactgaaaaattgccatggatgtcagttattcagcctataacttcggcagctatgtctggaattggaggttccgttactggaccggtagaaggaactagagtttatggtcattttttggacaaatggaaaactaacggaattgtccttggcacgtatggtggaatagttcgcgaaaaaccgaatagacttgaaggattttctgacccgactgggcaatatcctagacgtttaggaaatgatactaacgtactaaaccaaggcggagaagtaggatatgattcgtcttctaacattatccaagatagtaacttagacactgcaataaatcctgatgatagaccactatcagagattccaactgatgataatccaaatatgtcaatggctgaaatgcttcgccgtgatgaaggattaagactaaaagtttattgggatacagaaggatatccgacaattggtattggtcatcttattatgaagcagccagttcgtgatatgacccaaattaataaagttttatcaaaacaagttggtcgtgaaattaccggaaatccaggttctattacaatggaagaagcggtaactttatttgaacgcgatttggctgatatgcaacgtgacattaaatcacattctaaagtaggaccagtctggcaagctgtcaaccgttctcgtcaaatggcattagaaaatatggcatttcagatgggtgttggcggtgtagctaaatttaacacaatgttaactgctatgttagcaggagattgggaaaaagcatataaagccggtcgtgattcattgtggtatcaacaaacaaaaggccgtgcatcccgtgttaccatgattattcttaccggaaatttggaatcatatggtattgaagttaaaacaccagctaggtctttgtcggcaatggctgctactgtggcgaagtcttctgaccctgctgaccctcctattccaaatgactcgagaattttattcaaagaaccagtttcttcatataaaggcgaatatccgtatgttcacacaatggaaactgaaagcggtcatattcaggaatttgatgatacccctgggcaagaacgatacagattagttcatccaactggaacttatgaagaagtatcaccgtcaggaagaagaacaagaaaaactgttgataatttgtatgatataaccaacgctgatggtaattttttggtagccggtgataaaaagactaacgtcggtggatcagaaatttattacaacatggataatcgtttacatcaaatcgatggaagcaatacaatatttgtacgtggcgatgaaactaagacggttgaaggtaatggaactatcctagttaaaggtaatgttactattgtagttgaaggtaatgctgacattacagttaaaggagatgctaccactttagttgaaggaaatcagactaatacagtaaatggaaatctttcttggaaagttgctgggacagttgattgggacgttggtggtgattggacagaaaaaatggcatctatgagttctatttcatctggtcaatacacaattgatggatcgaggattgacattggctaatatacttccaatgagcgctgatttaggagaatccatggaaggttcttctatcgacgtcacctttaccgctcaattagaaacaggtgaaacgttagtatctataaatataactagttacgaagaaactcctggggttttagtagaagaaaatcgcttatacggaacatatgaatctgtatttggtttcggaaatgacgcgttgaaatatcgtttaggtgatgaatttaaaactgctgcttcatgggaagaacttcctactgattctgacactcagttgtatttgtggaaagctcctcaaaatctccagaagacattcacttacgaagtaacattaatatatgactatcaagaacaaagtgaatctggaggttctggcagtaattctaggtcatcttctgatactactgaaccgacagatcctcctgctccagtaagaaaaactctcgttaaaaattatactaaaactatagttggaaattggagtcgttgggctaataagctgagaagctatgtgtatgagaggccataaatgtcaggattaagttatgataagtgtgttactgctggccatgaagcgtggcctccaacagttgtgaatgctacacaaagtaaagtattcactggaggaattgctgttctagtagcaggcgatccaattacagaacatacagaaattaaaaagccatatgaaacacatggcggagtgacacaacccagaacttctaaggtatatgtcactggaaagaaagctgttcaaatggctgatccaatatcatgcggtgatactgtggctcaggcatcatctaaagtattcattaaataggatttaaaatggcaaatacccctgtaaattatcaattaacaagaacagcaaatgctattcccgagatattcgtcgggggtacgtttgctgaaataaaacaaaacctcattgaatggcttaatggccaaaatgaatttttggattatgattttgaaggctcaagattaaacgttctgtgcgaccttttggcttataatacgctgtacattcagcagtttggtaatgctgctgtatatgaaagctttatgcgtactgctaacttacgaagttcagttgttcaagctgcacaagataacggatatttacctacttcaaaatccgctgcgcaaaccgaaattatgttaacatgcaccgacgcattgaataggaattacatcacaattcctcgcggaactcgctttttagcatatgcaaaagatacttctgttaatccatataacttcgtttctaccgaagacgttattgctattcgtgataaaaataaccaatattttccacgtttaaaattggcccagggacgtatagtaagaactgaaatcatttatgataaattaacacctattatcatttatgataaaaatattgatagaaaccaagttaagctgtatgttgatggagcagaatggattaactggacaagaaagtcaatggtccatgctggttctacatcaacaatttactacatgcgtgaaactattgatggaaatactgaattttattttggtgaaggtgagatttccgttaatgcggcagaaggagcattgaccgctaattatattggaggtcttaaacctacccagaactctacaattgttattgagtacatcagtactaacggtgcagatgcgaacggcgcagtcggattttcgtatgcagatacattaacaaatataactgtcatcaatattaatgaaaatccaaacgacgacccagattttgtcggagcagatggcggcggtgatccagaagatattgagcgtattcgcgaattaggtactattaaacgcgaaacccagcaacgctgcgtaaccgcaactgattatgatacatttgtctcagaaagatttggttctattattcaagctgttcagactttcactgattctactaaacctgggtatgcatttattgctgctaaacctaaatcaggattgtatttaactactgtacagcgtgaagatattaaaaattatctcaaagattataatttagcgcctattacaccgtcaattatttctcctaattatctttttattaagactaatttaaaagtcacatatgctttaaataaactacaagaatccgaacagtggcttgaaggtcaaataattgataaaattgatcgttattatacagaagatgtagaaatttttaactcatcttttgccaagtctaagatgttaacttacgtagatgatgcagatcattctatcattggttcatcagcgacaattcaaattgttcgtgaagtacaaaacttctataaaacgcctgaagcaggtattaaatacaataatcaaataaaagatcgttctatggaatctaatacgttttcatttaattctggacgaaaggttgtaaatcctgatactggtttagaagaagatgtattatatgacgttcgtatagtatcaacagaccgagattctaaaggaattggtaaagttattattggtccatttgcttctggcgatgttacagaaaatgaaaacattcagccgtatacaggcaacgattttaacaaattagcaaattctgatggacgcgacaaatactatgttatcggtgaaataaattatccagctgacacgatttattggaatatcgctaaaattaatttaacatctgaaaaatttgaagttcagactattgaattatattctgacccaaccgatgatgttatctttactcgcgatggttcactgattgtatttgaaaatgacttacgtccacaatacttaactatcgatttggagcctatatcacaatgacagtaaaagcaccttcagtcactagtctcagaatttccaagttatccgctaatcaggtgcaagtacgctgggatgacgttggtgctaatttctactactttgtagaaatcgctgagacaaaatcaaactcgggagattttctcccgagtaatcaatatcgttggattaatttaggatatacagcaaataatagtttcttttttgatgatgctgatccattgacatcatacattatcagagtagctacagctgcgcaagattttgagcagtctgattggatttatacagaagagtttgaaacttttgctacgaatgcttacacatttcaaaatatgattgaaatgcaattagctaataaattcattcaggaaaagttcactcttaataattctaattatgtcaatttcaataatgacacaataatggctgcgttaatgaatgaatcatttcagttcagcccatcgtatgctgatgtctcatcaatcagtaattttattattggtgaaaacgagtatcatgaaatacaaggttctattcagcaagtatgtaaggatattaaccgagtttatttgatggaatcagaagggattctatatctttttgagcgctatcaacccgtagttaaagtatcaaatgataaaggacaaacttggaaagctgtaaagctcttcaatgaccgtgtaggatatcctttatctaagactgtatattaccaatctgcaaacacaacatacgttctaggatacgataagattttctatggccgtaaatcgactgatgttagatggtcagcagatgatgtcagattcagttcacaggatataacatttgctaaattaggagaccaacttcatttaggattcgatgttgaaatcttcgctacttatgcgactttaccagcgaatgtatatcgtatagctgaagccattacttgtacggatgattatatctatgttgttgccagagataaagttagatatataaaaacgagtaatgcacctatagattctgacccgttatcaccaacatactcggaaagactttttgaacctgatacaatgactataactggaaatcctaaagctgtatgctataaaatggattctattggtgataaagtttttgctcttattattggtgaagttgaaacattaaatgctaatcctagaacatcaaaaataattgattccgctgataaaggaatatatgttttaaatcaagacacgaaaacatggaaaagagttttcggtaataccgaagaagaaagaagacgtattcaacctggatacgcaaacatgtcaactgatggtaaattagtttctctgtcttcgagtaattttaaatttttaagtgataacgttgttaatgaccctgaaactgctgtaaaataccagttaatcggtgctgttaaatatgaatttcctcgcgaatggttagctgataaacattatcatatgatggcgtttatagcggatgaaaaatctgattgggagacttttactcctcaaccgatgaaatactacgcagaaccgttctttaattggtctaaaaaatctaacactcgttgttggataaacaactctgataaagctgtagtagtttatgctgatttaaaatacactaaagttatagaaaatattccggaaacatcaccagatagattagttcatgaatactgggatgatggcgattgcactatagtaatgccaaatgttaaattcaccggatttaaaaaatatgcatctgggatgcttttctacaaatcttctggcgaaataatttcttattatgattttaactatcgtgtgagagatacagtagaaattatttggaagccaactgaagtatttttaaaagcatttttacaaaaccaagagcgcgaaactccttggtcaccagaagaagaacgtggattagctgaccctgatttaagaccattgattggcacaatgatgcctgattcttatttgttacaagattctaattttgaggcattttgtgaagcatatattcaatatctttctgacggatatggaactcagtataacaatttacgaaatttaattcgtaaccaatatccgcgagaagagcatgcgtgggaatatttatggtcagaaatatataaaagaaacatttatttaaatgctgacaaacgcgatgctgttgcaagattttttgaatcacgtagctatgatttttattctactaaaggaattgaagcatcatataaatttctttttaaagttctttataatgaagaagttgaaattgaaattgaatcgggagcaggtactgaatatgatgtaatcattcaatctgattctcttacagaagatttagtaggacaaacgatttatacagctacaggaagatgtaatgttacttatatagaaagaagctattctaatggtaaattgcaatggaccgtgactatacataatcttttggggcgtttaatagcagggcaagaagttaaagcagaaagacttccaggttttgaaggcgaaattattcgtggggttaaaggaaaggatttgcttcaaaataatatagactatattaatagaagtagatcatattatgtaatgaaaattaaatccaatttaccttcttcccgctggaaatctgacgttattcgttttgttcatccagtaggatttggatttatagcaattacccttttaacaatgtttattaatgttggtttaactcttaaacatacagagactataattaataaatacaaaaactataaatgggattctggattgcctactgaatatgctgatagagtagccaaattgactccaaccggtgaaattgagcatgattcagtaacaggcgaagcaatttatgaacctggcccaatggctggtgtagaatatcctcttcctgatgactataatgctgaaaataacaattcaatatttcaaggtcaattgccgtctgaacgacgtaaattaatgagtcctttatttgatgcatctggaacaacatttgcacaatttaggaatttagttaataaacgtctaaaagataatataggaaatccaagagaccctgaaaatccaacacaggttaaaatagatgaatgattcaagtgttatctatcgtgcgatagttacttcaaaatttagaacagaaaaaatgttgaatttttataattcaattggaagtggtccggataaaaacactatctttatcacatttggaagatcagaaccgtggtcatcaaatgaaaatgaggtgggctttgccccaccttatcctaccgattctgtattaggtgtaactgacatgtggacgcatatgatgggaacagtaaaagttcttccatcaatgcttgatgcagttattcctcgtcgagattggggagatactagatatccggatccatacacatttagaattaatgatattgtagtgtgtaactcagctccttacaatgctactgaatcaggcgcaggctggttagtatatcgttgtttagatgttcctgatactggaatgtgttcaatcgcatctttaactgataaggatgaatgcctcaaattaggtggaaaatggactccttctgctaggtcaatgactccgcctgaaggccgaggagatgctgaaggaacaattgaacccggcgatggatatgtatgggaatatctttttgagattccgcctgatgtatctataaatagatgcacgaatgagtatattgtagttccttggcctgaggaattaaaagaagacccgactagatgggggtatgaagataatctcacttggcagcaagatgattttgggttaatttatcgtgttaaagctaatacaattcgttttaaagcatatttagattcagtttattttcctgaagctgcattgccgggaaataaaggatttagacaaatatcgataattacaaatcctcttgaagctaaagttcatccaaatgatccaaacgttaaagctgaaaaggattattatgatcctgaagatttaatgaggcattcgggtgaaatgatttatatggaaaataggccacctattattatggcaatggatcagacagaagaaatcaatattctgtttacattttaaattaagggagcccatgggctccctttttctttataaatactataaactcataaggaaaccgctatgttcattcaagaaccaaagaaattgattgataccggcgaaattggtaacgcttctactggtgatatcttattcgacggtggtaataaaattaatagtgattttaacgcaatttataacgcgtttggcgatcaacgtaaaatggcagtagcaaatggcactggagctgatggtcaaattatccatgctactggatattatcaaaaacactctatcgcggagtacgcaactccagtaaaagttggcactagacatgatattgatacttctaccgtaggtgttaaagttatcattgaaagaggcgaacttggcgactgcgttgaatttattaactcgaatggatcaatatcagttactaatcctttaacgattcaagctattgattcaattaaaggcgtttcaggtaatttagtagtaactagtccatatagtaaagtaactttacgttgtatttcatctgataattctacgtcggtttggaattattctattgaaagtatgtttgggcaaaaggaatcaccagctgaaggtacatggaatatttctacatctggatcagttgacattccactatttcatcgcactgaatacaatatggctaaattgctagttacgtgccaatcagtagatggaagaaaaattaaaacagcagaaataaatattcttgtggatactgttaattcagaggtcatttcttctgagtatgctgtcatgcgagttggaaatgaaacagaagaagacgaaatcgctaatattgcatttagtattaaagaaaattacgtaacggcgactataagttcttcaactgtcggtatgagagcagcagttaaagttatcgctacgcagaaaatcggggtggctcaataatgaaacaaaatattaatatcggtaatgttgtagatgatggtaccggtgactacctgcgtaaaggtggtataaaaataaatgaaaactttgatgagctttattatgaactcggtgatggtaatgttccatattcagccggtgcttggaaaacttataatgcttcatctgggcaaacattaaaagctgaatggggaaaatcatacgctattaatacttcgtctggaagagtaacactgcaacttcctaaaggaactgttaatgattataataaagtaattagagctagggatgtatttgcaacatggaatgttaatccagttactttagtagccgcttctggtgatactatcaaaggatcatcgtcatcggttgaaattaacgttcaatttagtgatttagagctagtttattgcgctccgggccgttgggaatatgtcaaaaataaacaaattgacaaaattattagttcagacattagcaatgtagctcgtaaagaatttttagtcgaagttcaaggacaaacagactttttagatattttccgtggaactagttataatgttaataacatcagagtaaaacaccgcggtaatgaattgtattacggcgatgtttttagcgaaaatagcgactttggttctcctggagaaaatgaaggtgaattagttcctcttgatggatttaatattcgattaagacagccttgtaatattggtgacactgttcaaattgaaacatttatggatggtgtatcacaatggagaagttcatatacaagacgccaaataaaagtactggattcaaaactaacatcaaagacttctttagaaggaagtatttacgttactgatttatcgacgatgaaatcaattccattttccgcatttggattaattccaggagaacctattaatcctaattctcttgaagttcgttttaatggaattttacaacaacaagctggaacagctggatatcctctgtttttgtgtgaaggcgctagttcagatacgcaagaaggatgtatatctcttggtggtgaatggaaagaatcaaacacagattattctatagaatatgaagatggaaaacctaccagtcttttatttgatagaaaatttgaatcaggcgatataatcgttataacgtggttcaataatgatttaggaactcttttagaaaaagatgacatcattgaattgactgatgaccgttatgttagcaaaggatcatctaccgaagttactggtgatgtagccttaacagattttgataaaatcggttggccaaatgttgaaaaagttgattcttatactagaacgtataattcaatatcatctattttcgatagcatttatcctgtaggttcaatttatgaaaatgctataaatccaaataatccggtgacttatatgggatttggttcatggaaattatttggtaaaggacaagttttagtaggatggaatgatgatgttacggatccaaactttgctttaaacaataatgatttagattctagcggaaatccttcacatactgccggtggaacagttggaacaacatcagtaacgcttgaaaacgcaaatcttcctgcaactaaaaccgacgaaagagttttaattgaagacgaaaatggatcggttattattggaggttgccaatatgacccagatgaaactggtcctatatatacaaaatatcgtgaagactacgcaacaacaaactcttcacatactcctcctgctaatattagtaatattcaaccgtctattactgtataccgttggataaggattgcataatgagtttacttaataataaagcgggagttatttcccgcttagcagattttcttggttttagaactaagaaaaatgatatttcggttatgaataatcagccagtaggtgctgtaacaatttcacaaatagcaaaaggtttttatgacccaaatgtagaatctgctattaatgatgttagaaatatggcagagcaacaggttggagctgtattagttaatataagcggtgtatctcctactggagtgcaacaaacagactactggtcatttgaaggaactgtcaatgatacttcagccaaaccaggtgacacagttattgttaacatgtttggtattccagttaaagctactaatggaatgacttcaatcgaatttaccagtgccgttagaacagctctacaggaaatggttgcaaaatttattgcaattgattcatttgaagaccatcctaccataggaaataaaatacaagttaagtatttagataaccaagaacatatcttagaacaatactctgataaaggaattactttcaaacaagaaataatttctccttctaaacctggatacggaacttggcaattattaggtgcgcaaactgtcacgctagatagtcacacacaacctacggtattttattattttgagagaatagcatgagtaacaatacatatcagcacgtatcaaatgaatcaaaatacgttaaattcgatcctacaggatcgaattttcctgacactgtcacgacagtgcagtctgcattatcaaaaataagtaatatcggcgtaaatggtattcctgatgcaactatggaagttaaaggaatagcaatgattgcgtcagagcaagaggttttagatggaactaataattctaaaatcgttacaccagctacattagcaacaagattattgtatccaaatgctactgaaactaagtatggtttaacgcgctattcaacaaatgaagaaacattagaaggctcagataataattcatcaataacgccgcaaaaactgaaataccatactgacgatgtgttccaaaatagatattcgtctgagtcatcaaacggggttattaaaatatcatctacacctgcagctttagctggtgtagatgatactacggcaatgactccgctaaaaacacaaaaacttgcaataaaattaatttcgcaaatagctccttcagaagacacagcatcagaatctgttagaggcgtagttcagttatcaactgtcgctcaaactcgtcaaggaactctccgcgaaggatatgcaatttctccgtatacctttatgaattctgttgcaacacaagaatataagggtgttatacgtttaggaacacaatcggaaattaacagtaatttgggagatgttgctgtaacaggtgaaacattaaatggtcgaggagctaccggttctatgcgtggggtagtaaaattaacgacgcaagccggtattgcccctgaaggtgatagctctggagcattagcatggaacgcagatgtaattaatactcgcggtggacaaactattaatggttctttaaatttagatcatttaacagcaaatggaatttggtcacgcggcggaatgtggaaaaatggcgatcaacctgttgccactgaaagatatgcgtccgaaagggttccagttggaactattatgatgtttgctggagattcagctcctcctggttggattatgtgccatggtggaactgtgtcaggagatcaatatcctgattatagaaacacagttggaacgagatttggtggcgattggaataatcctggcattcctgatatgcgaggtcttttcgtcagaggagctggtactggtggtcatattttaaatcaacgagggcaagatggttacgggaaggatagacttggtgtaggatgtgacggaatgcatgttggcggtgttcaagcacaacagatgtcataccataaacatgctggcggttggggagaataccaaagacatgaagctccatttggcgcgtccgtttatcaaggatatcttggaactagaaaatatgccgactgggataatgcttcatacttcactaatgatggatttgaattaggtgggccgagagatgcccttggtacacttaatcgcgaaggattaattggttatgaaactagaccatggaatatatcattaaactatattattaaaattcattactaaggattacaaatgattgaattaaaagatttaccttttgttgatagcgttcctggcgaaggtcaggaacgtatttcatggattaaaaatggtgaagaaatactaggagctagtactaagtatggaaacgatggatcaatgaatagaccaactgtgtccgtatttaaaaatgttgaggttcttgatgaaaatataggaattcttaaaactgccgttgaaacatcacaggaagatattaaaacaattcaaggcattttggatgtatctggagatatagaagcgctatcacaaatcagcgttaataaaaatgacatatcaaatttaaaaacgcttacgagtgaacatactgatatattaaatggtacaaatactacggttgataatattctttctgatattggtccatttaattcgcaagcaaattcagtttatagaacgattagaaatgatttgttatggattaaaagggaattaggacaatatgctgggcaagatattaatggtcttcctgttgtaggaaatagcagcacggggatgaagcaccgtatcattaataatacagatgctataacttcccaaggaatacgtctaagtgatttggaagaaaaatttattgaatctgatgtaggttcactgacaattgaagtcggaaatcttagacaagaacttggacaaagaccatcttcatttagtgaaagcatatattcacgtgtgcataatttagatcaatcacagattaatcttagttccgaaattaaatctatcaaaacttctattggatatccaggaaatacttcaataatcacagatgtcaatgtcaatagtcaagaaatttcagctttaaatgatgaactaaataaaagtggcggcgttaaacagcgattaactgttattgaaacatcgattggttcagatgatattccttctagtattaaaggtcaaattaaagataataccacttctattgaatctttaaatggaattgtaggtgaaaatacctcgtccggtttaagagctaacgtttcatggctaaatcagatagttggaactgattctagcggaggtcaaccttctcctccggggtctcttttaaatagagtttcaacagttgaaacctctgttaatagacttaacaatgatgttcaaaacttacaggttgaaattggtaataacaattccggaattaaagggcaagttgtaacactaaataaattagtaaatggaacaaatccgaatggttcaactgtcgaagaacgcggattgactaattcaataaaagctaatgagactaacatttcttcaattaatcaagagattcgtagtattaaaggtaatgtgtcctcattgcagagggatgtccagactttacaagaagctggttatattcctgaagctccaaaagatggtcaagcttacgttcgtaaagacggcgaatgggtattgctttctacctttttatcaccagcataacatggggccgcaaggccctaaaggattttaaatgtcaggatataattctcagaatccaaaggaactcaaagatgtcattctaagacgtttaggggctccaattattaatgttgagttaacacccgatcaaatttatgattgtatccagcgcgccctagaattatacggtgaataccattttgatggacttaacaaaggttttcatgtattttatgtaggagacgatgaagaaaagtataagactggagtatttgatttaagaggttctaacgtatttgcagtaactcgcattttgcgcacgaatattggatcaataacgtcaatggacggaaacgctacatatccatggtttactgactttcttttaggaatggctggtattaatggtggcatgggaacttcttgtaatagattttatggaccaaatgcctttggagctgatttaggatattttacccagcttactagttacatgggaatgatgcaagatatgctttcgcctattccagacttttggtttaattcagcaaatgaacaactcaaagtcatgggaaacttccaaaaatatgatttgattatcgtagaaagctggactaaatcatacattgatacaaacaaaatggttggaaatacagtaggatatggaacagtcggtccacaagatagctggtcattatctgaacgatataataatccagaccgcaatttagtaggccgtgttgttggtcaagatccagatgttaagcaaggtgcttataataatcgttgggtgaaagactatgcaacagctttagctaaagaactaaatggccaaattttagcacgtcaccaaggaatgatgcttcccggcggcgttacaattgatggtcaacgtttaatagaagaagctcgtttagaaaaagaagcactgcgcgaagaattatacttacttgaccctccatttggaatttttgtaggttaatatggctacttacgataaaaatctctttgctaaattggaaaaccgcacaggttattctcagaccaatgaaacagaaatactaaatccttatgtaaattttaaccactatcaaaacagccaaatactagctgatgtattagtagctgaaagcattcaaatgcgaggtgtagaatgctattatgttccaagagagtatgtttcccctgatttggtattcggcgaagacctaaaaaataaatttactaaagcatggaaatttgctgcatatttaaattcatttgaaggatatgaaggagctaaatcgttctttggtaactttggtatgcaagtacaggatgaagtaactttgtccattaatccaaacctgtttaaacatcaagtaaatggaaaagaacccaaggaaggtgatttgatatattttcctatggataacagcttatttgaaatcaactgggttgaaccatatgacccattttatcaattaggccaaaacgctattcgtaaaattacagcaggtaaattcatttattctggagaagaaattaatccagttctgcagaaaaacgaaggaattaacattccagaatttagtgaattagaactaaatcctgttcgcaatcttaacggtattcatgatattaatattgatcaatatgctgaagtagatcaaattaattctgaagctaaagaatatgttgaaccttatgttgttgtcaataacagaggaaaatctttcgaatctagcccatttgataatgatttcatggattaataaatattataaactaattaaagcccagattaggagaaatcatgtttggttatttttataattcgtcttttagacgatatgctaccttgatgggcgatttgttttcaaatatccaaatcaagcgtcagttagaatctggtgataagtttatacgtgttcctattacgtatgcatcaaaggaacactttatgatgaaattgaataaatggacatcaataaattcacaagaagatgtagctaaagttgaaactattctacctcgtataaatttgcatttagttgattttagctataacgctccatttaaaacaaacattttaaatcagaatttactgcaaaaaggtacaacttctgtagtatcgcagtataatccatctcctattaaaatgatttatgaattgagtatctttactcgctacgaagatgatatgtttcaaatagttgaacagattcttccatattttcaacctcattttaatacaactatgtacgagcagtttggaaatgatattccatttaaaagggatattaaaattgtactgatgtctgctgctatagacgaagctatagatggggacaatttatctcgtcgtagaattgaatggtcattaacatttgaagtaaatggatggatgtatcctccagtagatgatgcagaaggattaattcgtactacttatacagattttcatgctaataccagagatttgcctgatggcgaaggcgtttttgaatctgttgataatgaagttgttcctcgagatattgacccagaagactgggatggaacagtaaaacaaactttcactaacaatgtaaatagaccaacaccgccagaacctcctggcccaagaacatagaggttattatggaaggtcttgatataaacaaacttttagatatttctgacctccccggaattgacggggaggaaattaaagtatatgaacctctgcaattagtagaagttaaaagcaatccacaaaaccgtactccagatttagaagatgattatggagtagttcgtcgaaatatgcattttcaacaacaaatgctaatggacgcggccaagatttttcttgagacagcaaagaatgctgattctcctcgtcacatggaagtatttgcaactcttatggggcaaatgactacgacgaacagagaaatactgaagcttcataaagatatgaaagatattacatctgagcaggttggcaccaaaggcgctgttcctacaggtcaaatgaatattcagaatgcgacagtattcatgggttcaccaacagaattaatggacgaaattggtgatgcttacgaggctcaagaagctcgtgagaaggtgataaatggaacaaccgattaatgcattaaatgatttccaccctttaaatgaagctggaaaaattttaataaaacacccaagcttagcagaaagaaaagatgaagatggaattcattggataaaatcacagtgggatggaaaatggtatcctgaaaaattcagtgattaccttcgtctgcataaaatagtaaaaattccaaacaactctgataagcctgaattatttcaaacttataaagataagaataataaaagatctcggtatatgggtcttcctaacttgaaacgagctaatattaaaacacaatggactcgtgaaatggtcgaggaatggaaaaaatgccgagatgatattgtttattttgcagaaacatactgtgccattactcatattgactatggtgtcataaaggttcaattacgtgactatcagcgtgatatgctcaaaataatgtcatctaaacgtatgactgtttgtaatctatcacgtcagcttggtaaaacaactgtagtagctattttccttgcacactttgtatgttttaacaaggataaagctgtaggtattcttgcgcacaaaggctcaatgtctgcggaagttttagatcgtactaagcaagcaattgaactgcttcctgactttttacaaccaggaattgttgaatggaataagggttcaattgaacttgataatggttcctcaatcggagcctatgcttcctctcctgacgcagttcgtggtaactcgttcgcaatgatttatattgacgaatgcgcgtttattccaaatttccatgattcctggcttgctattcaaccagttatttcatctggtcgtcgttcgaaaattattattactacgactcctaatggattaaatcatttttatgatatttggactgcagccgttgaaggtaaatctggatttgaaccatatactgctatttggaattcagttaaagaacgtctttataacgatgaagatatttttgacgatggatggcaatggagcatacaaaccattaatggttctactttagctcaatttcgtcaagaacacaccgcagcatttgaagggacttctggtacattaatttcaggaatgaaattagctgttatggatttcattgaagtaactccagatgatcatggttttcatcgatttaaaagccctgaaccagatagaaaatatattgcaactctagactgttcagaaggtcgtgggcaagattaccacgctttacatattattgatgttaccgatgatgtgtgggaacaagttggtgttttacactcaaacactatttctcatttaattctacctgacatcgttatgcgttatttagtagaatataatgaatgcccagtttatattgaattaaatagtactggtgtgtcagttgctaaatcgctttatatggatttagaatacgaaggcgttatttgcgattcatatactgatttaggaatgaagcaaactaaacgaacgaaagcagttggatgctctacattaaaagaccttattgaaaaagataagcttattattcatcaccgtgcaactattcaagagtttagaacgtttagtgaaaaaggcgtgtcttgggcggctgaagaaggttatcacgacgatttagtaatgtctttagtaatttttggatggttatcaacacaatcaaaatttattgattatgctgacaaagatgacatgcgattagcatctgaagtgttttcaaaagaactccaagatatgggtgatgaatacgctccagttatatttgttgattcggttcattctgctgagtatgttccagtatctcatggtatgtcaatggtataaatatattaaagcatattaaagaggattaaaaatgactttattatctccgggcattgagctcaaagaaactacggttcaaagcaccgtggttaataactctactggtacagcagctttggccggtaaattccagtggggtcctgcttttcagattaaacaggttacaaatgaagtagatttagttaatacttttggtcaaccaaccgctgaaactgctgactattttatgtctgcaatgaatttcttacaatacggaaatgatttgcgagttgtgcgtgctgtcgatagagataccgctaaaaactcatctccgattgccggtaatattgaatacactatttctaccccaggtagtaactacgcggttggagataaaatcactgttaagtatgtttcagaagatgttgaaacagaaggtaaaattactgaagtagatgctgatggaaaaattaagaaaattaatattcctaccgcaaaaattatcgctaaagcgaaagaagtaggcgaatatccagcattaggttctaactggactgcggaaatttcttcgtcttcctctggtttagctgcagtaataactcttgggaaaattattactgattctggtattttattagctgaaattgaaaatgccgaagctgctatgacagctgttgactttcaggcaaatctcgaaaaatatggaattccaggagtagtagctctttatccaggcgagttgggcgataaaatcgaaattgaaatcgtatctaaagctgactacgcaaaaggtgcttctgcattactgccgatttatccaggtggcggaacacgcgcatctactgccaaagcagtgtttggatatggaccacaaactgattcacaatacgctattatagttcgtcgcaatgatgctattgttcaaagcgttgttctttcaacaaaacgtggtgaaaaagatatttacgatagtaacatctatattgatgactttttcgcaaaaggtggttcagaatatattttcgcaactgcacaaaactggccagaaggcttctctggaattttaactctgtctggtggattatcatcaaatgctgaagtgacagcaggagatttgatggaagcttgggacttctttgctgaccgtgaatctgttgatgttcagttgtttattgcgggttcttgcgccggtgaatctttagaaacagcatctactgtccaaaaacacgtcgtttcaattggggatgctcgccaagattgcttagtactgtgctcaccgccgcgtgaaactgtagttggaattcctgtaactcgtgctgttgataacttagtcaactggagaaccgcagcaggttcatacactgataataactttaatatcagttcaacctacgcagcaattgatggtaactacaaatatcagtatgacaaatataatgatgtaaatcgttgggttccattagcagctgatattgctggtttatgcgcgagaacagataacgtttctcagacttggatgtctccagctggttataatcgcggccaaattttgaacgttattaaacttgctattgaaactcgccaggcgcagcgcgatcgtttataccaagaagctatcaacccagtaactggtacaggtggtgatggttacgtattgtatggtgataaaacagctacttctgttccttctccatttgatcgtattaacgttcgtcgtctgtttaatatgttgaaaacgaatatcggacgtagttcaaaatatcgtttattcgaattaaacaacgcgtttactcgttcatcgttccgcacagaaacttcccagtacttgcagggaattaaagctctcggtggaatttatgaatatcgtgtagtttgcgatacaacaaataacactccgtcagtaattgatagaaatgagtttgttgcaacattctacatccaaccggctagaagcattaactacattaccttaaacttcgtagcaactgctactggtgcagatttcgatgagttaactggtcttgctggttaatacggtgcattctaaaggcctgtttcgacaggccatataaatacactatatccttaattctttaattctatatgccctaggttaaacatagggatataaatactacagaggctaatatgtttgtagatgatgtaacacgagcgtttgaatctggtgattttgctcgacctaacttattccaagtagaaatttcttatcttggacaaaattttacgtttcaatgtaaagccactgctttaccagctggtattgtagaaaaaattccagtcggattcatgaaccgtaaaattaacgtagcaggcgatcgtacattcgatgactggactgttacagtaatgaacgatgaggcacatgatgctcgccagaagtttgttgattggcaaagcattgctgctgggcaagggaacgaaattactggtggaaaaccagcagaatataaaaagagcgctgttgttcgccaatatgctcgtgacgctaaaactgtaacaaaagaagtcgaaattaaaggcctgtggcctactaacgtgggtgaacttcaattagattgggattcaaacaatgaaatccaaacctttgaagtaactcttgctctcgattattgggaataaaatgaatggggagaaatccccatcctgctttaagcagagaagtccattataaatataactataattcccatttggagaatacaatgaaatttaatgtattaagtttgtttgctccatgggctaaaatggacgaacgaaattttaaagaccaagaaaaagaagatcttgtttccattacagccccaaagcttgatgatggagcaagagaatttgaagtaagctcgaacgaagctgcttctccttataatgctgcattccaaacaatttttggttcatatgaaccaggaatgaaaactactcgtgagcttattgatacatatcgtaatctcatgaataactatgaagtagataatgcagtttcagaaatcgtttcagacgctatcgtctatgaagatgatactgaagtcgtagcgttaaatttggataaatctaaatttagcccaaaaattaaaaatatgatgttagatgaatttagcgatgtattaaatcatctatcgtttcaacgaaaaggttctgatcattttagacgttggtatgtcgattcaagaattttctttcacaaaattattgatccaaaacgtccaaaagaaggcataaaggaattacgtagattagaccctcgtcaagttcagtatgttcgtgaaattataacagaaactgaagctggcacaaaaatagttaaaggttataaagagtattttatatatgatactgcccatgagtcatatgcatgtgatggtagaatgtatgaagctggcacaaaaataaaaattcctaaagctgctgttgtttatgcccattctggattagtcgattgttgtggtaaaaatatcatcgggtatttacatcgtgctgttaaacctgctaaccaattaaaattattagaagatgctgtagtcatttatcgcattactcgtgctcctgaccgtcgtgtgtggtatgtagacacaggtaatatgcctgctcgtaaagctgctgagcatatgcaacatgttatgaacacgatgaaaaaccgagtagtatatgatgcatcaacaggtaaaataaaaaatcaacaacataatatgtctatgaccgaagactattggttgcagcgccgtgatggtaaagctgtgacagaagttgatactcttcctggtgctgataataccggtaatatggaagatgttcgttggtttagacaagctctttatatggcattacgcgttcctctttcacgcattccgcaagaccagcaaggcggtgtgatgtttgattctggaactagcattacacgtgatgaattaacgtttgctaaatttattcgtgagctgcagcataagtttgaagaagttttcctagatccacttaaaacaaatcttttgcttaaaggtataatcacagaagatgagtggaatgatgaaataaataatattaagatagaatttcatcgggatagctactttgctgagctcaaagaagcagaaattttggaacgaagaattaatatgctaaccatggcagaaccatttattggtaaatatatttctcacagaactgctatgaaagatattttgcagatgactgatgaagaaatagaacaagaagccaagcaaattgaagaagagtctaaagaggctcgtttccaagaccccgaccaagaacaagaggatttttaatggaaggtttaattgaagctattaaatcaaacgacctcgtagccgctcgtaaattatttgctgaagccatggctgcaagaacgactgatttaatcaaagaagaaaaaatcactatcgctcgtaatttcttaatcgagggtgaagaacctgatgacgaggatgacgacgaagatagcgatgatgataaagacgacaaaaaagacaaagactctgacgatgacgaggatgatgaataatgattctaatccctgaaactcatgaattagttctcgagaatgtcgaagcacttattcctgaagcacagggtcgctttgacgagttgtcttctgctttaaataaagacgatataaataaaattatcgagaatatgcttgatgatgaaactgatttagcggttgcattagcttctattaatgaaaatatgccgttaaatgaatttatcgttaaacatgtttctgcccgtggtgaaattactcgcactaaagatcgcaaaacccgcgaacgtaatgcatttcaaactaccgggttgtctaaagcaaaacgtagacaaattgctcgtaaagctaccaaaacgaagattgccaatccagcaggtcaatctcgtgctcagcgtaagcgtaaaaaagctcttaaacgccgtaaagcattaggattaagctaatgaatgaaccccaattgctaattgaaacttggggtcaacctggcgaaattattgatggtgtgccaatgcttgaatcccatgatgggaaagacttaggtttaaaacctggtttatacatcgaaggaatattcatgcaagcagaagtcgtcaatagaaataaacgtctttatccaaaacgtatattagaaaaagcggtaaaagactatattaatgagcaagttttaactaaacaagctctcggagaattaaatcatcctccacgcgctaatgttgacccgatgcaagccgctatcattatagaagatatgtggtggaaaggaaatgacgtatacggacgagctcgtgttattgaaggtgaccatggtcctggagataaattagcagctaatattcgtgccggatggattccaggagtttcttctcgtggattaggttcattgactgacacaaataaaggttatcgtatcgtaaacgaaggattcaaattaactgtaggtgttgatgcagtatggggtccaagtgctccagatgcatgggtaactcctaaggaaattacagaatcacagacggcggaagccgatacaagtgccgatgacgcctatatggctctcgcagaggccatgaaaaaagcgttataaatattattatctaaacaacaggactacaaaatgcttaaagaacaactgattgccgaagcgcagaaaattgatgcttccgttgctcttgatagtattttcgaatcagttaatatttctccggaagcaaaagaaactttcggcactgtattcgaagctaccgtcaagcagcacgccgttaaattagctgaatctcatatcgctaaaattgctgaaaaagcagaagaagaagtagaaaaaaataaagaagaagcagaagaaaaagctgagaagaaaatcgctgagcaagcttctaaattccttgaccatcttgcaaaagaatggctcactgaaaataaattagcagtagataaaggtatcaaagccgaactgtttgaatccatgcttggtggattgaaagagctcttcgttgaacacaacgttgttgttccagaagaatcagttgatgttgtagctgaaatggaagaagaactgcaagaacataaagaagaatcagctcgtctgttcgaagaactcaataagcgtgacgcatatatcaattatgtgcagcgtgaagtggcattgagcgaaagtactaaagatctgactgagtctcaaaaagaaaaagtctctgctctggtcgaaggtattgattattcagatgcattctcaagcaaattgagtgccatcgtagaaatggtgaagaaatctaataaagatgaaagcactattactgagagtataaatactcctgatactgaagcagccggactgaatttcgtcactgaagctgtagaagataaatctgcacaaggtgcagaagatattgtaagtgtatatgcgaaagtcgcatctcgtttctaattttaaaggttaacacaaatgactatcaaaactaaagctgaacttttgaacaaatggaagccattactggaaggtgaaggtttaccggaaattgctaatagcaaacaagcgattatcgctaaaatctttgaaaaccaggaaaaagatttccagacagctccggaatataaagacgaaaaaattgctcaggcattcggttctttcttaacagaagctgaaatcggtggtgaccacggttataatgctactaacattgctgcaggtcagacttctggcgcggtaactcagattggcccagctgttatgggtatggtacgtcgtgctattcctaacctgattgccttcgatatttgtggtgttcagccgatgaacagcccgactggccaggtattcgcactgcgcgcagtatacggtaaagacccaatcgcttccggcgctaaagaagcattccacccaatgtatggtccagatgcaatgttctctggtcagggtgctgctaagaaattcacagctctggctgctagcacacaaaccacagtaggtgatatctatactcacttcttccaggacactggtactgtgtatctgcaagcttctgctcaagtaacaattagtgcaagcgcaactgacgcagctaaattagatgctgaaattaagaaacaaatggaagctggtgtactggtagaaatcgctgaaggtatggctacttctatcgctgaactccaggaaggtttcaatggttctaccgataacccatggaatgaaatgggcttccgtatcgataagcaagttatcgaagctaaatctcgtcagctgaaagctgcttactctatcgaattagcacaggacctccgcgctgttcacggtatggatgctgatgctgaactgtctggcattctggctacagaaattatgctggaaatcaaccgcgaagttgttgattggattaactactcagctcaggttggtaaatctggtatgaccctgactccgggttctaaagctggtgtatttgacttccaggacccaatcgatattcgtggtgctcgctgggcaggtgaatcctttaaagctctgttgttccagattgacaaagaagcagttgaaattgctcgtcagactggtcgcggcgaaggtaacttcattatcgcttcccgtaacgtagttaacgttctggcttcagttgataccggcatttcttatgctgcacagggtctggctactggctttaacactgatactaccaagtcagtatttgctggtgttctgggtggtaaataccgtgtatatatcgaccagtatgctaaacaggattatttcactgtaggttataaaggtccgaacgaaatggatgctggtatttactacgctccatatgtagctctgactccactgcgtggttctgatccgaagaacttccaaccagtaatgggattcaaaactcgttacggtatcggtatcaacccatttgcagaatccgctgctcaggctccggcttctcgcatccagagcggtatgccttctattctgaatagccttggtaaaaacgcttacttccgccgtgtatatgttaaaggtatctaatctttgacgatttaagggaccttcgggtccctttagttgtttttatggtataaataaatcatataaaccaaaaggaaagcgcaatggctaaaatcaacgaacttctgcgcgaatcaaccacaacgaatagcaactcaatcggtcgcccaaatctcgttgctttgactcgcgctaccactaaattaatatattctgacattgtagcaacgcaaagaactaatcaacctgttgctgctttttatggtatcaaataccttaacccagacaacgaatttacatttaaaactggtgctacttatgctggcgaagctggatatgtagaccgagaacaaatcacagaattaacagaagagtccaaattaactctcaataaaggcgatttattcaaatataataacatcgtttataaagtattagaagatacaccatttgctgatattgaagaaagcgacttagagttagctcttcagattgcaatcgttcttttaaaggttcgtctattttctgatgcagcatcaacaagcaaatttgaaagctctgatagcgaaattgcagatgctagattccagattaataaatggcaaaccgccgttaaatctcgtaaacttaaaactggtatcacagttgaattagcacaagatttagaagcaaatggatttgatgctcctaatttcttggaagatttgcttgcaactgaaatggcagatgaaatcaataaagatattctgcagtctttgattacagtatcaaaacgttataaagttacaggaattactgatactggattcattgatttgagttatgcatctgcacctgaagctggtcgttcattataccgaatggtatgcgaaatggtttcgcatatccaaaaagaatcaacttatacagcaacgttttgtgttgcttcagctcgtgccgctgcgattcttgctgcatcaggttggttaaaacataaaccagaagatgataaatatctttcacaaaatgcctatgggttcttagctaatggtttaccgctttattgcgatactaacagcccattagattatgtaatcgttggcgtagtagaaaatatcggtgaaaaagaaattgttggatcaattttctatgctccgtatacagaaggtctcgacttagatgaccctgaacatgtaggtgcatttaaagttgttgttgatccagaaagcttgcaaccgtctatcggtttattagttagatatgctttatctgcaaatccttacaccgtagcaaaagatgaaaaagaagcaagagtaattgatggtggagacatggataaaatggcgggtcgttcagatttgtctgttttattaggtgttaagctaccaaaaattatcattgatgaataaaacaaagggacctttcggtccctttttatttaacttaccaattcaatccaagccggacgaagtacatcttgcaccattttaactaattcctttttaatcaaagaaggattatccgcttgagttagagtaataccttcacgagaagtttcttccaaaatatcttggacagttagccccatcacctttccaaaatcctttagaccaatttcgccaattttagaaataacgttatttactcggttcagtgtaacgtaacaagctaaaattcccaccaatttgttatcagcttctgacaattcaactttagctttaataggcttatcagactttttcttttcactaaatttagaattcttgcatttgatggctacacgattgcgattaggcagccaagaaggataacaaggtttcaatacatatccttcagcggtaaatacttcgcctttggcttcgacattccaaacgcatttatttgcatcaactaatccagcatggtctactgtaaaattataatcttggacgacagaatctaaatcatttggcaatttaataagctcttcaaatttaccgcgacctaaaagtggagccattttaaatttaaatgtattgcagaatgattccatcatataatcatcgacataagtcacgtcaccactttctgtagtgacaataatgtcaaatacatagaaatctttatcaccataatcaacattcttctgaatgccaggtccagcgaattcgccaaaaacttgataagtcacaacagctgaagtttccataatatcttgtactgctttaatggaatcagcgtaattctttagaataatttcatacccaaagaaatcttcagcaggaagaatcggtccagtacgtttagcgcaagttactttatcacgctcaataatcaatgagaaatttgtgccgtgaatcttttcacgagctacccattcgccgccagtcaatcccaagctataaagtttttcaataaatttagagttgtaatgattttcaagactgctatactttttaaacataattaatcctcaaaatgtaatttctaaccaatcaccatcacgctgatcactattgactttaaaattaaatccttcttttctcagccaatcaccaatttcttcagtaatcaatttatcacgagcagtacaataataactaaaatatgttttaccttgttcagctgctttattagcaagttctgaaaaatctttaataaaacactctagtttaaactgtttactttttaatgctttttcacgtaattgattagcaaaatattcattttcataaagatcatactgttccatttttcacctttttattaatgtgtctttttctatagacaactttttctcgagtctcaaatttattctttgcagtcatagctcgagcccataatacagccacttctttcgcctgtaagtttaattcacgagcaatttcaatgaatgactttccagactcatgaagtgtaaacaccacaacttcagttctcataatcaatctcatgttatcgagttggtgccattatatacatcattttctgattgtgttttgtgtgctttcaaaatgaagaaaggggccgaagcccctttcgattatggataagtatagatgataccagtttctaaagcagttttatggatgatgtatccattacgtgattcttgaacatcaacttctggataatctttcatcatcttctgaagcgtataacgatgcaagtagtacttactatctggatcttcagttttccaatctttaccttcttcagtcattttttggatttcatccataacccaccaaccgcaccagatataagctgaagtacgatgtggaagaggatgaacataaggcaattcaccttccggttctggagcaactttatcagttacctgaacttgacccgtcgttttaactgttttgctatcataatcagtagcagtaacagttgccgtaacttcaatagtttgacttccaatagatgaggtatcaacggtatatacattagttgacccttctacaggagaagaatctttcttccatgaataagtaatttgcgcttcttctggagcatcagtgacattagcagtaaatgtagccgaagcatcttgctgaacgttaatagaaggaggagtcaatgtaacctgtggattcattgtctttttattaacagtcagtgatacttcattcgaagtaacttccttttcattgtaattttctgctgttacttgggctacgcatttaattctttttaccccacttgtagttggagtatagctaaatgtagagttagtttctccaccaacttgagaatcatctacataccatttatatgtagcagacgctccatcaggttgagaagctaaggtagcagtaaattgaactggggttccaattactcctgctggaggactattaggagttactgccaatgtagttgtctgtgtctttttattaacagtcagtgatacttcattcgaagtaacggttttttcatcataatttgtcgcggttacttgagctacacacttgatttttttaactccgctggcggcaggagtgtaattaaatgtagcagaagtcgcttcgtctacaggagaatcgtcaacgtaccattgatacgtagcagatgcacctgatggctgcgaagctaaggcagcagtaaatttaacagctgttccgattactccagcagcgggactattgggagttactgccaatgtagttgtctgagttttgtttttgactgtgatagttgtagtagcttctgctgtttcagcttcagattctggaactgtatttgttgcaacaactttaatagtcttttgaccagcaggaccttttaatacataatcaaaagttgcttcagacccatcttgtggagcattatctacactccaagcataagtaatagttccacctccagtttcaccactgggtgcagcagtaaactgcttggtttcatcaataacccctgtcggtgttttaggagttatatcaactgtaaaagccataagttatccttattttaatgttacgaaagaagaattgcgtgtttcacgaattaaaactgatccgtcgcgattaatgtaataaattaagctaaacaaagtttggtgtgctgacgcgtgttcaaaactagttggatgagatttccaatcaggagtttcagcgatccattgataaatccaccaaggaaccgtacagaatcctggatttttccccaataattgaagattcgggctaaagttttccggaagagtaaatacagacggcttttcagattcaataatctcagctatagcttgttcaaacttttcttcaacaaaaggagtgtcttcaatcaaaacatcagtattttcaggaattttatccgtttctaccacttcaattttaatatcagatttaactggagaatcaatcagaagtgctgcttctggattaacttcttcatcgtcatattttaatccctctgcagcatcagcagcatcaattaagtctttaatagataacccatcagtctctggcataggttcactagcgagcttctggagggcttcttcaatatcagcaacgatattatcaaaagatttattctttttgacctttataccaaactgttcagcatattcagctaatttagctttagcttctttattatcatcaagagccttcagctctgcaatataatctttatctatcataatatttcctcagtataaatatagatatatttattacatggtatttagacatgactgacattaaagtacatttttatgattttagtcacgtgagaattgattgtgaagaaagtacatttcatgaactccgtgatttctttagctttgaagctgatgggtatcgttttaatccgaaatacaaatatggccactgggatggacgaatccgtcttttagattataatcgtcttcttccattcggcttagtcgggcaaattaaaaagttctgtgataactttggctataaagcctggattgacccacaaattaacgaaaaagaagaattatcaagaaaagattttgatgaatggctttctaaattagaaatctattcaggaaataaaagaattgaaccacactggtatcaaaaagatgcagtgttcgaaggattagttaatcgtcgtagaattcttaatcttccaacatccgcaggtaaatctttaattcaagctttgcttgcacgttattatttggaaaattatgaaggtaaaattcttatcattgttccaacaactgctctaacaactcagatggctgatgacttcgttgactatcgtttattcagtcatgcaatgataaagaaaattggtggcggagcatcaaaagatgataaatataaaaatgatgcaccagtcattgttggtacatggcaaactgtagtaaaacagccaaaagaatggttctcacagtttggaatgatgatgaatgatgaatgccatcttgctacaggaaaaagtatttcatctatcatatcaggtttaaataactgcatgttcaaatttggtctatctggttcattacgtgatggcaaagccaatatcatgcagtatgttggaatgtttggtgaaatatttaagccagtaacgacttctaaattaatggaagatggacaagtaactgagctaaaaattaatagtatttttcttcgctatcccgatgaattcactaccaaattaaagggaaaaacttaccaagaagaaataaaaattattactgggcttagtaaaagaaataaatggatcgctaaattagctattaagcttgcgcaaaaagatgaaaacgcttttgtcatgtttaaacatgtatcacatggtaaagctattttcgatttaattaaaaatgaatacgataaagtttattacgtatcaggggaagttgataccgaaacccgcaatataatgaaaaccttagctgaaaatggtaaaggaataattatagtagctagttatggtgtattttctactggtatttcagttaaaaatctgcaccacgttgttttagcgcacggtgttaaatcaaaaatcattgtattacaaacaatcggtcgtgtattacgtaagcatggttcgaagacaatagcaacagtctgggacctcatagatgattgtggtgttaagccaaaatctgctaatacgaaaaagaaatatgttcatttgaactatcttttaaaacacggcattgatcgtattcagcgctacgcagatgaaaaatttaattacgtaatgaaaacagttaatttataagggcttcggccctttggagaaaaagatgttactagaatttaaacaatttctttatgaagcttctattgatgaatttatgggtaaaattgcctcttgccaaacgatagaaggtttagaagaacttgaagcttattataagaaaagagttaaagaaactgaattaaaagatactgatgacatctctgtgagagatgctttggcaggaaaaagagctgaattagaagattcagacgatgaagtagaagaaagcttttaaattaaaaaaggcccaaccaaaaaggaagggccaaaactatagactaaaggtcacactatagcaaaagttgtgtttcatttaattgttcttccgaactttctgaaactggtagttctttaatgtaattatagcaaggcccaggatgtacaggacctttgtctgtttcaacaaccaatgcagaatcgattggagttttacagacaacacaaatcttatctgacatgattgtctccttttgaatatagtaatatttataaacccattttaatccgcatttcttgtacacggattaagcaagcttccatctctgctaatagtcgaaatacttctttataatctgtcatatttaccccatatctctcatatgcatatcaatgcccatatctttagaataaaaatattcatcaagatatccggcaaattttcctttaatataaaggacatcttcaccacacgggtggtcggccaggatacgaatatcctgacgcttaagattatgctttttcattaagaattgaatctcagtttcaaattcttcttcataattaaaagcatcatcaatgttatatctcattattttccagcctcaaatgcccgcatgtcttgaatatgcttaatagcaaatcctcgtgatttgatagcatcaagagctccgctacagaaatccaataaaattccccaatattgtaatgaagtatcaacctttaaaacatccttatcagctgatagaactgttttcatttctgatttctcgtaacgatccatactaaattcatcaccatctcctcgtcccgagtagtagtctaatttagctttaagagcaacttttttctgtgcttcaattctaagcatttcctttttaatacttgaatgcttattaagccatttactatataacatcacattattagctgcttcatactgtaatttagtcgaatctataaacacatctttcttcaattcttcttgaagatcttctaatctcatattgttctctattcaattgttattggatgggcttagattcattataccacgtttatacgtgaagcattatactctattactggaagccagttgtagttttatctgctcaatatcatcagggttatcgatgactgaaaagcgtatttctactatcaaagtataatcatcataaaccggtattacattaactgctaatttatcaatacgtggctcatagtttcttactgcgctttcgatattacgctcaaccgtgtcagcagtaagaggagtcatattctcaaaaagttggtcagataaatcgcatccaaattcagggtcaaacggtcttgaaccttttcttgttgtaataattcctaaaagactatttttaattgaccttaatccaagtgatcttgaaacgtctttgttccaatccattttcatctctgggtcaatatcagaataaagcttattaatatttgccattacaatagctcaaagaattctttgagtcctcttattacatgagcgtgggtttttccacactctggacatttaattggaacagccaaataaacagtaggctttaaaagcatatcttttatagctacaatatctgactctgtgatgatagaatataaatcttccaattctttttcatttaagtcttcaactggaatgctttcaccgttagcatgaatcgtttctatacatgatactatcatgtgggctatatttttatcatcaaaaattttagggtaatggaatttaattttaatgtcacccagtgtataccagaggtcttctggtgcatctatttgtgtatgtaatagatttatatgggttggtatttcagttccacaggtgcacttccaggagttttcgtgattaacttctccaagagaatgcgcccataaatgaatcagtaatagttctgattcttggcggtttaaatcttttgcatttgtgcagtctttgattagctttttaacaattacttctacggaaccattatttttggcagtaataagttctagatattctttaagagtaaatgcacgacagttgattattttagaaccaactctcacgtcaaatttgtattcatacatatttagctcctttatttatcatatttataaatagaataaaaggagcatctatggcaaacattattcgttgtaaattacctgatggtgttcatcgttttaaaccatttacggtagaagattatcgagattttttgttagttcgaaacgatatagaacatcggtcatcacaagaacaaaaagaagtaattgctgatttaattgctgattattttggagactatccaaagacttggcaaccatttatatttttgcaggtatttgtaggttcaataggtaaaactaaagtaccagtcacattcatatgtccaaaatgtaaaaaagaaaagacagttccatttgaaatatatcaaaaagaattaaaggaacctatttttgatgtagctaatgttaaaattaaattaaattttccttctgagttttatgaaaataaagcaaagatgattactgaaaatattcattctgttcaagtagatgaaatgtggtatgattggaaggaaattagtgaatcaagtcaaatagaacttgttgacgccatcgagatagaaacattagaaaaaattctcgatgcaatgaatcctattaatttaacattgcacatgtcgtgttgtgataagtacattaaaaaatacactgatatagtagatgtgtttaagctattagttaatccagatgagatatttactttttatcaaattaatcacacgcttgtaaaaagtaattatagcttaaattcaataatgaaaatgattcctgccgagcgcggattcgtattaaaactgattgagaaggataaacaataatgagtatgttgcaacgccccggatatccaaatctcagcgttaaattatttgagagttatgacgcttggagtaataatagatttgttgaattagctgctactattaccacattaactatgcgtgactctctttatggtcgaaatgaaggaatgctacaattttatgattctaaaaacattcatacaaaaatggatggaaatgaaataattcagatttctgtagctaatgcaaacgatattaataatgttaaaacacgaatttatggatgcaagcatttttccgtgtcagtagattcaaaaggcgataacatcattgctattgaattgggaactattcattctatagaaaatcttaaatttggtagaccatttttccctgatgccggtgaatctataaaggaaatgcttggcgtaatttatcaagatcgtacattattaactccagcgataaatgctattaatgcttatgttcctgatattccatggactagcacatttgaaaactatttgtcatatgtaagagaagttgctctagcggtaggaagcgataagttcgtatttgtatggcaagacatcatgggagttaacatgatggactatgatatgatgataaatcaagaaccatatccaatgattgtaggtgagccaactttaataggtcaattcgtccaagaattgaaatatccattagcatatgattttgtttggttgactaaatcaaacccgcataaacgtgatccaatgaaaaatgctactatctatgctcattcatttttagattcttcattaccaatgattactacaggaaagggtgaaaactctattgtagtgtcaaggtcaggtgcttattctgaaatgacttatagaaatggatatgaagaagctattcgtcttcagactatggcgcagtatgatggttacgctaaatgttctactgtcggtaattttaacttgactcctggcgttaaaattatttttaatgatagtaaaaaccaatttaaaacagaattttacgttgatgaagttattcacgaattatcaaataataattccgtaactcatctttatatgttcactaatgcaacgaaactggaaacaattgacccagttaaggttaaaaatgaatttaaaactgatactaccactgaagaaagtagttcttccgataagtaataaagaagtttctattcctaagatgggtcttaaacattataacattttaaaagatgttaaaggtcctgatgaaaatttaaagcttcttattgattctatttgtccaaatttatcaccggcagaagttgatttcgtttctattcatttgctagaatttaatggaaagattaaatctcgtaaagaaatagatggttatacttatgatattaatgacgtttatgtatgtcaaagattggaatttcaataccaaggaaatacattttattttagacctcctggaaaatttgaacaatttttaactgtaagcgatatgttatccaaatgcttgcttaaggtcaatgatgaagttaaagaaattaattttcttgagatgccagcatttgttttaaaatgggcaaatgatatttctacaactttagcaattcctggccctaatggtccaataaccggaattggcaatattattggattatttgaatgaaaaagccacaagaaatgcaaacgatgcgtagaaaagttatttcagataataaaccaacacaggacgcggctaaatccgcttctaatactttatctggtcttaatgacatttctacaaaattagatgatgctcaagctgcttctgaattaatagctcagactgttgaagaaaaatcaaatgaaatagttggagcaattgataacgttgaaagcgcagtaagtgatactactgccggttctgagttaattgctgaaactgttgaaattggaaacaatattaataaagaaatcggtgaatcgctcggaagcaaattagataaattaacaagtttactggaacaaaaaattcagacagctggaattcagcaaactggaacgagtttagcagtagtcgaaaatgctattcctgttaaagtcgtcgaggatgatacagctgaatctgtgggtcctttattaccggctcctgaagcagttaataatgatcctgatgctgattttttccctactcctcagccaattgaaccaaaacaagagtctccagaagagaagcaaaaaagagacgcatttaacttaaaattatctcaagctttagataaattaacaaagacagttgatttcggatttaagaaatctatttcaattactgataaaatatctagcatgctatttaagtataccgtcagtgctgctattgaagctgcaaaaatggttgcattgataatggctgttgttattggaatagacctgctgatggttcattttaaatactggtcagataaattttcaaaagcctgggatttatttagcactgattttactaaattctctagcgaaaccggaacatggggtcctttattacagagcatctttgattctattgataaaattaaacaactttgggaagctggagattggggcggattgacagtagctattgttgaagggcttggaagtgttctttataatttaggagagcttattcaattaggtatggctaaattatctgcagcaattcttcgagtcattcctggcatgaaggatactgctgatgaagtagaaggaagagcattagaaaatttccaaaattctactggagcatctcttaataaagaagaccaagaaaaagtagcaaattatcaagataaacgaatgaatgatgatcttggcccaatagcaaaaggattagacaaaattgcgaactggaaaactcgtgcatctaactggattcgtggtgtagataataaagaagcattgactactgacgaagaacgtgcagcagaagaagaaaaattaaaacaactttcaccggaagaaagaaaaaatgctttaatgaaagctaatgaagctcgtgctgcgatgattcgttttgaaaaatacgctgattcagctgatatgagcaaagactcgacagttaaatcaattgaagctgctcatgaagaccttaaaaaacgaatgaatgatccggatttaaataattcaccagcagttaaaaaagaacttgcttctagatttgctaaaattgatgccacttatcaagagctcaagaaaaatcaacctgaagcaaaacctgaaacttctgctaaatcaccagaagcaaaacaggtccaggtgattgaaaagaacaaagcacaacaagctcctgttcaacaagcatctccttcaatcaataatactaataatgttattaagaaaaatactgtcgttcataatatgacacctgtcacaagcacaactgctcctggtgtatttggtgcgacgggagttaattaaggaataatatggcaattgttaaagaaataactgctgatttaattaaaaagtccggtgaaacaatttcagccggacagagtactaaatcagaagtaggaactaaaacatacacagcccagtttccaactgggcgtgctagtggtaatgacactacaggggacttccaggtaacagatctatataagaatggattattatttactgcatacaatatgtcatctagggattctggaagtcttagaacgatgagatctaactactcttcttcatcttcgagtattttacgtacagccagaaacactatcagtaatacagtatcaaaactatcaaatggactaatatcagataataattcaggaacaataagtaaagttcctgttgcaaatattcttttacctagatctaaatctgacgtcgatacgtcatcacatagatttaatgatgttcaagatagtcttattacaaaaggcggaggtactgctactggtgtgctaagtaatatggcttcaactgcagtatttggtgcgcttgaaagtataacacaaggaataatggctgataataatgaacagatctatacaacagctagaagtatgtatggcggtgctgaaaatagaacaaaagtgttcacctgggatttgactccgcgctcaacagaagatttaatggctattattaatatctatcagtattttaactatttttcttacggtgaaactggtaaatctcaatatgctgctgaaataaaaggatatttagatgagtggtatcgttctacatttattgaaccattaacgccagaagacgcgattaaaaacaagacgttatttgaaaaaatgacatcgagtttaacgaacgttcttgtagtttcaaacccgacaatttggatggtgaaaaactttggtgcaacttctaaatttgatggaaagactgaagtattcggtccatgccaaatacagagtattagatttgataaaacaccaaatggtaactttaatggattagctattgctcctaaccttccaagttcttttacactcgagattactatgagagagattattacgttaaaccgtgcttctttatatacggggactttctaatgtattctttagaggaatttaataatcaagcaataaacgcagacttccaacgtaataatatgttcagctgtgtttttgctacaactccatcaactaaaagttcatcgttaataagctcaattagtaactttgcttataataacttgggtctaaattcagattggttgggattaactcaaggtgatattaatcagggaattaccacgctaattaccgctggcacacaaaaactgataagaaaatcaggggttagtaaatatcttattggtgccatgagtcaacgtacagttcaaagtttattaggctcatttacagttggtacatatttaattgacttctttaacatggcatataactcatctggattgatgatatattctgtaaaaatgccagagaatagattatcctatgaaactgactggaactataattctcctaatattcgtataactggaagagaattagaccctttggttatttcatttagaatggattcagaagcttgtaactatcgtgcaatgcaagactgggttaacgccgttcaagacccagtaactggattgcgtgctttaccgcaagatgtcgaggcagatattcaggtcaatcttcattctcgcaatggattaccacatactgcggtgatgttcactggctgtattccaatatctgtgagtgctcctgagttatcatatgatggagataaccaaataactacatttgatgttactttcgcttatagagtcatgcaggctggagcagttgatagacaagctgcccttgaatggcttgaatctgctactataaatggtattcaaagcgttctcggaaatagtggaggtgttactggactatctaattcgctttcacgacttagtagattagggggaactgcaggaagcatttcaaatattaatactatgacaggaattgtcaactcgcaaagtaaaatattaggagcaatataacaatggggaccgaaaggtccccatgtttttatttacggaatgaaataaaagcagcaactgaagaaacagaggtttcttcaatataaacctcaatttttaccggagcttctgactcaaatttacctgttactacaccctgaaaaatactttcagtctgttctggctttgaaaaattttcagaaggaaaaattccaaactttttatcggttccgaaaattttaataaattcatcgtaaactgcttcattaaaagcattatcagcaggaataacgccttcaactacaagttcttgacctaaaaagcgcaaagaagatttcattttgtgttcctcatgttatgtcagtaagactactataacacaacacgagggacttgtaaactacattttgaactttttagacattccgttaatgttaaccaaagaagctaagatttgagaaacttcgttttcctcttcttttgattcttctacaaggaattgattaaatccagccattggacgaacttcaccagtttccattagatggtcgccatcatatactgattcttctaattgttcagaaggaggaacgattgtaccttcgattagatacttgttataagcagtttctttcataaagtaagtacttactttattaatcttcagtaaaattccacgtggtagaataacttcagcttctgatggaaatcctgataaatgacccggaacgataactttaactcgttcagctcctttaattaccatacccacgctagtttcagcatcttcattagcatatgtagaatgactacccatatgcatcaaatcttctgcatcaacggaaccttctccttcaccagaaaatactgctccggaatcatctaaggccatataatttttaccatactcaccaaagatatttggtttaagtgatgtcgatacgaagttcttgaaatagaacattttattttcaatgttatgacgcaaagttttaaaagtaacttcttgtccacggtaaagtgtagttcctggaggaagaactgaacctttaacgaatgcagaatcaagcgtctcaatatgtttaatagctcgttccatatattcttcacgggtagaatctggtttacccaaaaggaacgagttcatttcaacatatgaatctgcgcaataatcttcaattacgtcagattcagcctgagttaatccttttggagttacttcggtgcttgcatattcatacgcctgagcagcggattcatcaattaatttataaatgccattcatgacaaattgaataatagctgtcttttcatctggcgtagctttagaacctttaactaaatcattgacaattttcttaataacatcaaagctattagaaatattaatgtcagcaagatcgcttaaaattttatcagttttgtaattaaagaagtctttattctttaaatattcctgggaaccttgatatgatgtatcgctctgcaacttgatagatggatcgcgtaaacgtgcatgggctaatgcaatatgatttcggaaactttctagttcataatcgctagatttaaaacgagaagcacttctcataccgccgatagctcctttgctaaagtttgaaccaatctgaataacgccagagttcattggtccttctgctttatataccggaactttagattcaaactcttgatatttcttagcagcgaagctatcaccctgaagtgaagcatcaacagtagaatattgagcttgtgctgctaatcgacgactaattttagttttctgaataacagcttgatccgtacgcttatcattttctaaagcaatagaagcagcaactgcgacagctttaggaacagcattacctgttttaacgtctacataaacatcaccaacctttgattcaacttttgtgaataactcagttgaaataggaggtacacctggaatgtcttctaaattggcatttttacggtaaaccataatatatgcatatttcttatcatagtcccagatttcctttaaaagaacatatcgacctgctcctttagtacgtactaaacggtcagcaataacttgcatttgacgagcagcgccatttgttttactttttagtacgcggaataggcatgcatcaattttatactgtttcattgtttgaagagcagtatcaaaaaccgcattaatgacaccaattggatttccacccaagtttttaagcttgactaatgataatttctcgttgacacctatcattacgatatgcatcattttgtcgcctggcttaacgtttttattcgtatcaccgccagaggtgtatgtacaaaatcgaaatccaggaagaacgctttcttcaccggcttgaatagcaaaaatttgaggtattttatgcttaggatttaagttaacaaccggcgccgaagcgccgtcaaataattctgtaataagttccatgatttatccttgaacgaacttgtaaggcatgtttgtaatatctatgcaagacgcaataattccaagagatgattctactttctgtttaatatttgatgaaacaaatgatgcaaagtcaactctgtcttctatttcaatatcacctgtcattgcaaccaattcaccagtttccattaaatggtctccatcatagattaccgattcggtgagctcttccgtggtcataacttcagcttgaatgagttttgtattattagatgttgttccgtcattattagaagcatcagttattttattaaccttgaccatcaatccgcgtggtagaataacttcagcttctgttgctattccgagacttcctggatatacaacattaactttatgagctccatcaattgcccatcctatttgaactttaacatattcaggattttctttatacgctcttatttcgtttggattaatagttattccttcttcatttttatcaactgttaattcgttacgagcttctggttctaaaagaccaataccagcatgtgtgattccaaaacgtccaaaaatgataggagttaaagaagtagatacaaaatttctgaagtagaacactttatttttaactaacgcttcatatataggagcagtcatactttgagcacgataaactgtaatgccttctggtatacggtcaccattttcaaaagctgaatctaagttatttatagcagattcaatttctttttcactcattacatcatatcgttctggattgtaacgacctaaaagaagattattgatgtcagtatatcctgaaccgcaatattctctaatgccacgcttttgtgatggagtatatttagaaccatcgcgggcaatagtaatatcaatcattggaccagcaccaattccagaaaaactgtaaatcattcgtttgaggaatttagtttttgctgcgttccaggaatttttagttatttcttcccagacttcatctggttgtcctttacgatttttattatgattagcaagccatttatctttataatcttcaaagaattgatttacagctgctgcgtatttctctaaacattttattgaagtagttggttcatttttaattgcattaaaaattacttctttaattttttctgaaacttcaccgacttgactcattggaaagaatttataatcatagtgaagttcatctgccgttccttcagcaataatttttgctgcctttgttttagaagctaatgaattaattccaattttcatttcttctgcttcgggaattaaaggtgcagtagctggtttattaaaattagctgctgtagattcatacttctggaataattcactttcaaatctagaagattccaatgactgactttgtgcaattgctctacgggaaattttaactttaacgattacggcttggtcagaacgtttatcattttcttgtgcaatagatgcagcaattgcctcatttttggttacttgagctccagtatctttattgatataaacatcaccgaccttcgattcaactttagtaaaaagctcggtgctaatttctggaactcctggaatgtcttctagtgatacatttttacgatgtataagaatatatgcatactttttatcgtaatcccagagttccttaagaaggacgtatctgccacctgaacgactgcggatgagtctatcagcaataagttgaatttgtcgagcttgaccggcggttttagacttaagaatacgaagcatgcaggcatcaattttatattgacgcattgtttgcattgcaacagtaaaaactgaattgatataattaatcgggcttggaccaagaccttttaatttagcaattgaacctttagcagttaatgtaaaaggaacaatgtgcatcattttatcgcccatctttaaatcacgattagtatcacctccagatgtataggtacataaacgaaagcctggttgttcaattgcatcatcaacatgaactgaaaaaatttgtggtattttcttctttggatttaagtttgtaatcggaagagtagtatcttcgtcaaataattctgtaatgagttccatcatatcctctctagtgtttattctatttataaaattaaaggcccgaaggcctttaataatctattggtaatagagtacgatatatttcaaactttggacctttttcataagcatcaaaagtttctgtgaatttattataagcatatgcatctataaattcaatcatgatttgcgatacagaagtagaaacatctccaccttctttttgagccacgacaattgtttctaagtaagctttcataaaccagttacctcatgaaaatcgccaaatacatcttcgaacgtattagctttagttttatcttcacgtaaacgaattgcaattggaagaaatagcttaacgtaatcagtacgtccatctaattttacccagccgttgcattcgcactctagaatttttccaatataataattttggttttccataatgcgagtacgatcaagttcatgcgattttataccggctttatcttttaagcctgaaccagcatttactttaatttttccacactctgattcaagaatgaaaccacctgctttagtagggtctttacggtgaggataaattcctacaatttttaaatcaacatcaattacttctttaaatttataaagattttttgaacgagcattttcccataatccatcgatatttttgagaataataccttcaagaccttggtcaatatactttttataaattaccttagcttcatctaggttatttactatctggttttcaattaaaattactttatcatagcctgatgtcatttgttctagtttagaaaaacgtacatcatattttaaacgaaatgctggaagaccatatatttctactaatggaacatagtcccagacctgaaacttcatgcattgtgcttctttttcagaaatggttccctttaaagatttattagcgattccattagaagtagtacgtgattcagctacttcggcgaattctttagctttactaatttcaggataagcatcaaaaagaaaatctaggccttctggttccttttcaacttgctcatggtataccaattcgccatcaattaacacaccttctggatgaatctggcgagcttctgcagtcattttgattaactcttccttgagaagatctaatcctagatattcattaccagctcgtgataaaagacgaacatcatctaattcatcacctctgacttcagcaaagcaccgagctccatcagcttttaactgggcaaaagctggaaatttgatattcttattaatgcctttttcatcataagaacttgccagcatttgaggttgttcaggaattaaacctggccaaactttgtttgcaatagatactgatgcaccacattcaaggtctcgcatcatcacccgacgcaaaacttcaacatcatcttttttaccgtcagcaatatatccagttaattcctcaattgccgcatttccggtcaatttccgagtagctaacgtgaattcaatgaagtcaagcatatcggtaagagtcaacattccaaaactctgggtagtaatacccggtttaggccatttcttgatataatactgtaacccacgagaataagtcagacgatatactcgtttaagcaattcattatctttattcttttcaagaattgcttgcttctgcttagttgaaccaatagatgctatttcgttcagaattttaagaatcattgttcatcctttagagtttggtttacagctctattataaatcaattcatcattaagctcagtcaaagacctgtggtacgtggttctaactttatttccttgcatccagtgcttgacgtaaatgaaaccttgctctacacattttttaaaaattcgttcgtctttttgagctcggaattctggattgcatctaaaaaattgatttacgtgaccgtaatcacgtgtagtattaccttcattttcataaatagtgtgaacaacaaacattagaatgctccttggaaaatattatcaccgctagtaggtctattatacaaatactctatgccaccaggtttaatatagttccatgtctgaaacggatgcgtctgatatggatgatatagattataaggattaaatccaggagttctccaggtagtgttccaaggaaaagaatcgtttttaatcatcttttcaattacatcttttacagctttttcactatcaaaactttctttattttccttcgatggaaaaagcttattctctacatcattccatgtataaactcgctgtgcagtttttggaatactgtcacgctcccctcgagccatccaataaacaggaacatttaatatttcacttgcatgatcgcagtggtgagcgagatcgtcaatataacaaattacgttatatttctcttttgcctttttgaacaactcttcttttgaagaatcatgaccacacatcaatacttctgagaaggcaccaggaaaaagagcattcaaattaaattgacgattcagcagagcgtcaatagaatcacccaatgctgtaacagctacaaaattataatcttcttttaatttgttaattacacatagggcatctttatatggagacaaatagcgaataaaatctgaacgattatacttttcgattaatttaacaccaagttcttcatcgcaattaaagagcttaccaggagaaataaatttttcgtcctgaatcatttttaaaatatgttccaacggaagattatatttttgggcaaaataaggaaggcccgattgccagcttaaacacaccccgtcaatatcagtcaaaatagtaggcttcatagagagtctcttaataggtttaacacatcaataaattcagcttcggttagtattgtatcatcttttgttagactactagccatgctgtgcttcaaaacttttcctttcgaggctagtaatgcatcacgaaagcccttgttttgaatcgctgcctcaaaatacgcatttgtgtataattctttccacgctggagagtatcttgaaaacggaactccgagccagaagagggtcccacggtcctgagctctagcataagaccttccagcttgttgggcggcaagcccggataacccaaatacacgacgttgctgttcaacatttttcaccttacatccttggagaaatccttcaagacctccaaattggataccattcataacaaaaggccattgggcgaaattacttaatgcacacgatggccatctaaaattgcttctaatctctaactcaggcattttcaatacttataatttcaacatcagcccaatgaccatagcaaggaagacgaaattcaactggccagttagggtccttttctaatataatagacttaacttgtggttcttcatgttcatcagtatatggatttttatctgttactttatatgtgaccttaatgtactgaattccaaaaatcttattaattatattcatactaattcctttaatccgtaaataggagataattcatcacccatacgaaggtcttcatttccatctacccaggaaacaatataagcctcttttatttgaacaccactccatttaaatggaggtagaaccttagaaattaatccaggtataccaactccctttaattcaacagtttgacctaaaaagaatttcatcagaacctcatctgaaagccgtgtgatttaacattaccgccgccaatatcagaaatattaatttcacgcgcaattgaagggtcaatgtcaatttcacgattaagtttagcgatagctaaagtatcacgcccatttactgtacggaattctaaaggacaaaccacatcaacataatttttaattgattcactggtaggttgcaaatgagcaggaaggtctttaggcgccttagagaaaaccacttcacagaaatttttgcgggtgtcaaaataagtagtcataaacatagtattttccttagtaaggggccgaagcccctcattttattttaaatatcaaattcgttaagaactacatcaaagattgcttcaagatgctcaggtttagctctgttactcagaatatgacgaatccaagttttaaccagaagcttgcgattagcgccattccagcaaggatgggtccctaaatcgcgttgacgaaaatcatcatccagagcgattttgaagtttgaaccttccattgtgattgaaaccgtgatgccattttcaaatcgcatataaacgtagttaggagtcatatactgttcaatttcgcatactgatccattttgatgtttccaaaggcaaatagtatcaatagaacctgcaataccattagaaacatatttacgttcaaagttgatgtagttcatttttattctccgagatgtttaattgcggtacaggtatataatatcatatcctgtaccaaagtaaacaattattttactactttccagtgcttcatgtcaagtttaccaacttttttcatcttctcaatcaaacgttcggcacgttggcgagctgtaacataataccattcgcctaattcattttgttcaatttttccaacgattactgtattcaattcataaatccaaccagtaaagaaattatgaacttgaattgtaaaggtgaaatctgttcccataccttctgttgtttctacttcaataatatcaccttcaattgccattaagaaccacatagtttcatcatatttaccattgaagcatttagtcttaactgcagcgttcagattaatcgttttcattttattctcctttgtttgtgtaagataatactatcacaaaggaaccatactgtaaacaactttatgcaatctttggaaaataaaaaaggactcccgaaggagtccttaacttatgctttctgcttaccaaaacgagaagcatcatctcgaagaaccgcacgtgctcggcgcatgatcttctcaacagtttgattgatacgagagttcgacccacgcttgtagccagcgcgtttagaatcaccaactttcttttcaactgctttctttgctttagcttgttttgccattataaattctcttttaaatgaaaatgcaggacttattggcattgcctgcgcaagccctcaaggggaacataggttttggatatttaacgacaggataaccataaacccgtcatcattcacattcaagaggtacaccataaaactgccggggtcttaaaactataatgattcgcaaatcattaatcagacagttcgatggctcctcgattttagctcacactaaggcagtgaatctccaataaattacttcaatgttaccacaaagtgacgaactgcttttcgcgcagcagaagccagaggcttagcatacttaagttcatctttttcctgaagctcagcagctaatgcagtttgagcaggatttagatgtttgaaataacgcaggatttcaagagcttcggcttcaacatcaatagatgcgccatagttttcgtgaccattattccatgcgtttcgttgcagttcaagagcgtgttgtaattgtttaatcatttaaaaattctcgttagagattaaaactcggtagtcacgttcttctgaatttcatcttctttcgacagatctctcagttgtagactaccacatagaattgttcggttaacttattattccgacacccaattcatattattatttatatcacttataaagacacggaatagctttatagtgacaagtaacgaatttttgtttaatttcttttggctgcttaagacccagagctacaaaaggatgcggaacatttcgaatttgaccaactggaagagaagtcaaatcaccaacttcgcagaaaccttcaggaacatcaggaccaacagagtgaactacacacagttcaggaacttcaccttgaacacgtttaccgataataagtcctgattctgtaacttcttcatcaccggcttgtgcaggttcagaaactaaaataacatattcaccgacagcacgaattggtagctgttgtacttcagacatcgtttttcctttttgttaacagatgaattaataataacaaataattcttaaagcatttatttaccaataaattgaagcaaatgctcaactttcataccattaacagaaatcaatttgtcaatagaaaaacctcgccactcgccaagctcaacatcaaatactggaatcatatcagtagattctttccgagcagattcagtcaatttaccagtttgcatggttggcataaagtcagcatcacgagtacctttcatagtacgaatagtaccatcagacttttcaaaaactacgtttgaaacacccatggacaatttagttttcaaaatttcacgaattgctactttctgttcagttgtcagtttcatttatttacctattacagttttaatatgagttgttccacgttctttaagggtggaaagtaatttttggcatttttctaaatcagatttccaactatatggtctatcaatactagtccaatcagttttataatactgtttccatttagagaaaaaatatttcttatactctacagcaaacgagatgttctcattagaataagaactaattgctgtgagctgtaccaaacgaaatttcattattcaccacagaattcgttgatattttcccagtttaacttattcaagtttttcttaggaacattaaacacttcaatacctgcatttcgcagaatatcatcccagccaggtttatttttatcgtatgtttcacaataaaccagttttttaataccagattgagctatcgcttttgcacaatctggacaaggagaaagtgttacatacatagtagcaccttcaatagaagaaccatttcgtgcagcaaacaaaattgcatttagttcagcatgaatttcatttttagacgaccattcagagtgagcgctccggtgttcttttgccaagacaaaacgatcagttgaaccaaatgatacgcattcaggcttatggccttgaatgatagtatgtttaggcttattcagcaaccaaccttgctcagcagcataatcacaacagttcacaccccctgcgggtgaaccattatacccagtagaaataatacgtccattcttttcaattactgctcctaccttccaggagcaacattttgattcctgcgatactaaatatgcaatttgaagtactgtactcgctttcatttcataatcaccagataagcagatttagcagtttcaacacgataaatttcgtgacgaagtttagttatacttttaataacagaactaattatattctgcccatctttaaagcggtttttcttatcaataaaaactgcgccagtcatctttttgtgaagctcaactggatacttcgtcacaataatagcatcatacacagaaggatgaatactattcaccagagtatcattcattaaagttattctaatgaactgtgctgtttcagaatcaagcgctctatgatcgccagtatcattttcaagacaattatcaattatatcagttaaattcatcatagtacgccatacaccctttgtgcttcaactaatccatcaaaatctaatttaagatgcgatatttgatcgccatcacctggattcacaattactaatactgaacgaggagtttcggtaataacacgaaccgatgtttcaggaaatcgttcagaaatcctatttactaattcctgcgcaaatagtttaactttttcttggaattctttaacagtaattggtttttcacttagcatgttgatcccagctccttactttcaacgtttttaactaatttgacagaaactaattcagcatcttgagtaatcattaccggaccttcttcatactcttcaagatattctagagctttctttttagcttcttccttcgtatcagtttgagcatagatatagaacatacaaccagtaatacctactactttccacttaatttctttatcagttttaatttcaaatttacttacagaatcatctttttgaacttcttcgaaaaaagaatattctaacatataagcaattgaaaataacgggctaactttataggattcacccattacatcaacagctttataccagcagtcatcaatttcgcgtttaatgctaataacatttttcgcagggtcaatttttactttaaatgaattttccccaataaactgggcaattcgtttattagccccgcaagtttcattaaaaatatctttatatccagctttaaagcgataaaccttatcttcttcaaaccattcgctcatttcaatttcctcatttgttttggtagagctataatatcacaactctaccgtaaagtaaactattaaattgctttgaattctgatgtctgtgattcaaagcgaatgtcgcctttgataactagctcagcatcaagaccgaatacgacaatgatatgcgctgaacctggatacaacgtgatggcaacagaatccacctggtctggaagcaaagtattcaatacatgagtcacttgagcatggattcgaagctcagctgcattatcaagtttttcaaacatattattagcgataatttggctaaacactacttctacgattttagagtaagtcggaaacatatttacctcacataattttcttcaagccaatcaataacatccaaagcgttatcaaaagttgaaccatctactctgtcttctgtttcataatcaagaacatctaagcctactcttccatcaacaataggccataaacaaaatagatatttcttttctttttcaattttatcacaaagatgataaatcttttctaggttattcataagttttccatggtaaaggcagtttagttttctttactactagttcaacatcaggattcttttctcttaatttaagacattcctcccatgctctattttcactagtaaatacacaaaattgcccattactagtaccaactaaaccgctatttacaataacaatagcccaagtttcatggtgcaaagccattaaaaatctcccgaggcgacttgccagcattcaacaccgatgcgacgccacatttcaactacttgagtgcggtcatcaatagctaatttcacgtcaaaatgcggcgcgatgtatttccagaaaatttcttctttaactacatcatctttacgggtatcgccttgttcgcgttgacattgcataactaatggaacgccagcaatatcctcaacccatttacgggtcatacgataatattttgttgggtcttcttcagttccactttcacggcctgaaacgactacgatttgataacccataagagcatacatcttagacagttcaacaaccataggattgataacatcggtatcgcattttccaaggtcataaggaccacgaccattcattttagctagtgtaccatcaacatcaaaaataactgcttttggtttaccaggagtcccattatatactggaagaccgagatactctcgcatgcttttatacattgagcgtaaaacatcaattggtactgctttagttccacgttttgagttacgtttaaccaattcagtccaaggaacatcaaacactttatattcaatttgatgcccaagctctttggcaaactcttcccagaccttacgtcgttcaggattcagattagtatctgaaacaattacacccttcgttccgtcttggcagagaatcatatgtgccgcatcgtgttgcatataagtcacgatgctttctttcttcttggtgtatttgtactcatcacgttcttcgtgtgccataacagactggcgataatcatcacgattaatattataaaacccaggattcttagcaataaattcacgagcccaagtgcttttaccagaaccaggacaacctacagtcaaaataatctttttcatcatttaattcctaagaaaacttcaagaatacgaatattatgctcacgccgtcctttgtacaattcagctgttgattgattcgctgatttactctgaacattggatgaaataaattttatcatgtgatttttaagctgatacatatcaagcccacgagctttcgcttcttttcgcagggctttaccagcatcatctaaagctttagcatgttcaatatcttggctaatgcttgatacattttcacggcatgcatcaatgtaacggtctgaacattcaatataacgttctaacagagttttcatttatttttctcaaccaatgattgaatataatcatgcaggtctttagatgctttaccccacttattttgatattcatttttgagattagcgcgtgattgagctaataaaacatcattagttggaggtaaagattctaatcgttgaatctgtcgtccataaatcattgcagccatctcggattcataaattaatccttttagatgttcaaattgataccatgaaatcatttacatttatcctcttttagctcttgacgataataacatatcatagttttctggtcatgtacatatcgttttacatcattaagccaaatacgaaattcctgagaatcttcaaatggcatacctacccaagctttaccatcaataactttaacttgccaagatagtttagcttcgtcatatgactttatttgcacaggccaattaggatgaactgtttctttctttacttctagaggctttgtcgaacaaccaactagaagaccaatagataatattactgcagataatttaatcatttagaaaggtcctggatgtcttctgcgaacttgttgaaggagttgttgatttgtttttcaaccaatcctggcttacgagccaccacatccgccttctttgcatctttgcgcagtttttcattttcacgctcaatagcagcaatcgcctcacgatttttattattcatcgcatcaatataattatactgaattcgcaaattatttaatgctaaggcgttttcattggccgtttttgtaatttctacaacagacgtttctaatctttctaccttattttttaaaataatagatgttccgccaaatgctattacaagtaatagcaatccagctgtaaaattacttacatgcataaagttttaataacctctataatatcgtcttgagaaagaccgttaattaaaatatgatgttcagccggagatttagaaattttaaagcacgccgcaacatcttctgccatatccgatgcgctacgatttggattactaattccaagacgatgctttcctgtcaaaggattaacgatgatatagcatttgcagctattgatatgaacattaggttgagtctgattaataaacacttcacaatcatacttagcgagttgattttctaaaaagactttcatctcctcaaccgcatcaggaagcatatcacgggcttgctcaagacgacgatttcgatattctttaatggtcgttttccgcttgacttgcttagctaaatctttcttaagatcggtgatatatccaactcgacgatttcctttgaatacagaaatcccatctgtagtatcaccgtatgcttcaacgaccatttcagtagtaataagctgcaaatccatcataaagtcctcatgttatgtcagtaagactactataacacaacatgagggacttgtaaacagcttagtatccttctgggataaattttttataatttttcaaaaaattctgttcgatttcacacatgaccttctcttgactatcgtacccctggtataggctcatgatgataccaaacaaatgatccattccagcacctttagcaacaccttgcgcttccatcgcataagtctttctatccttaccacaatgcttattgtgacagtcaagaactaaaaacagagctcggtctaagtacttcagataagtcgtttcaaatgcttcaatttttctgtatgaatattcatcatcggcgtacattgctttaagatcgtctgatgcaccgtcaataatagtcttaaacaatttttctggattatctaatgaactttttgtgctatgaagagacacgtaccagtcagacttaattttaaaatgagaaccatctttcatcacagcaacatagccttcgatgttttctgcatttttagcttcttcaacccatttaggactattaatttcgtatcgttcaactagatatggacgaagagcagcatctttataaatatcatcatatgaaatgtattcgcctgtttcattttcacgaatattcaataaaatgattttcatctcttgataagcaagaacgattctattagttggagcgacgaattcgaagttagcagtaaatccatctttggctaattctttaagcctatcgcgcaactggtgatgattaatattcatcaaaattccattagccattaaagcctgctcagatttgattgaaccctttgatttgaacagaatttcatcaccgtctaaataagttgataccaaagacccatcttcttttgttagaatgtaatcaacatcgtttaaatcgatattcatcgtgaatggattttcatttaagttaaaaaacttttccataggacgagaggcaattcttactggtttttctccatccatttcaaacatgattccacgacattccaatgcgtctggaagtaaccaatcagaataagatgcataattatatgagaaaattctgtaagttcttccagatgcacttacatcatctgagtaaaaaaacttacgctgtgaatccttacatagttccattaaattgttaaaaagttcttgcattgtgtatcctcttttgtgttttgaatatagtaccacactccatgtggaagcatcatttcttcttgtgttgaatattccaaggtgggttaaacagtttaatgaatagtggctcctctaggtcaatcgttgcgattgtcattgtacctaactcatttgtcatagaaagattaaaacattggcgggcgtaaaattcaactttgcttccttcctttagcgcagcatgaattaatgcagatttagtagaatcagacgttttgtctttacgattaatagcagttctataataatttattcttttacgtaaatttttagtttttccaatataaacaagctcatcatttatagcaatagcataaattacgttatacttatttggaatagataattgttttatacttccgttgtcgtctaattctaactcagtatatttaataaatgaatattctgttgcaatttctttcataataaaatgggccttgcggcccactccttaaaagtattttttaaaactcatcataactttatcatcaacatcattatcaatctgtgcaacaagataagatgacagttctacttcttgtggcgcggattgaacattatcagaattaaggtattcacgaatccaaggatatggatgtttaaccggagcatcggtaattgggcatggaagaccacactgtttcatacgagatacagttaagtaatcaataaagctccacatgctatttgtatttaatccaggaacatcgccatctttaaataaatgaactgcccaatctttttcttggcggttaacttccatgaaaatatcaactgcttcttgttcacactcttgagcaattttaacccattcatcaccatcagtgccaagttggagctgacgaataatatactgggtgcctttaaggtggagttgttcgtctcgagcaatgaatttcataatcttcgcattaccttccatgatttccatatttttatggaagttgaaagtacatgcaaaggatacataaaaacgaatagcttccagggcattgataacatgaaggcagagataaagcgacttcatcaatgcatatttacattcttccacatgcataagactatttgaatatgcatctaaatcatattcattttcggaaaaacatttaaaaatttcttttgcattttcccattcgcgcgtcttaaccagaacatcatcataataacgaccaatagattcagcacgtttcatgatagctttatctaatacaatctcatcaaatacctttgacggatcagtataaagatttcgcataatatgagtgtatgaacgactgtgaatagtttcactaaaagtccatgtagcaacccatgtatcaagacttgggtctgaaattaacgacataagtacagcagacggtgcacgaccctgaatgctatctagaagtgattgatacttcaggttattagtaaaaatatcttgctgatattgaggaagcttgttaaattgcgcagcatccatcattaagtttacttcttcaggacgccagaaaaatgataattgcttttcggttaaatcttcaaaaactttatggcgttgaatatcataacgcgcaataccaagacctgaaccaaaaaacataggttcttttaaaacatcaactggatttgtattaaaaactgtgctcataaattttccacttagttaatagacagtgactcgtccatgagtcaaattatatcataatttacaggatgaacaatcttcagcttttggagtttctatttcataatcatcagtaccagaaccatcacgggtattatgataatagaaattttttccgccaaaataccaaaaatacaaaaggtcatcaatcattattgacattggaacctttccttttggaaaaatctgtgggtcatagtatgtattcgccgaagctgattgacaaacccatttcagcataatagctacctgcgtgagataaggtttattacctttcttagctaatttccatgtataatcatagaggtctatgttatgctcaatattgggcacgacttgattaaaggagccctcttttgattctttaacagagactggtccacgtggaggctcgataccgtttgtactgttagaaacttgggaagatgactcacatggcataagtgctgataatgtgctattacggatgccaaagagcttaaggtcttcccgcagcgacgaccagtcacaaacgtattttggagctgcgatttggtcaatctttttattgtaccagtcgataggtaattcgcctcgagaccaacgagtgtctgaataatattcgcaaggtcctttttctttggcgagcttaatggatgctttaatgagtccatactgtaatctctcaaatagttcatgtgttaaatcgttagcatcttcataagaagcaaagttacttgccagccaagctgcatagttggtaacacctacaccgaggttacgacgctttttagctttttctgcttcaggaactggatatccttggtaatccaaaagattatcaagagcacgaacttggacttctgccaattcattaattttatcttggtcttgccagtcaaaattatccagtacgaatgcagagagagtacacaatccaatttcagcatcggggctattcacatcatttgttggaatagcaatttcacagcacaagttactctgacgaataggtgctttttcacgaataaacggagtatagttattcgtattatcaatgaactgtacataaatccttgctgttcctgaacgttcagtcatgagcaattcaaatagttcacgggctttaatacgttttttacgaatattagggtctttttctgctgcttcgtataattcacggaaacggtcttggtctttaaaataagaataataaagctcgccacccatttcatgcggactgaacaaagtaatgtaatcgttctttccgaatcgttccatcatcaaatcattcagctgaacaccataatccatatgacgaatacggttttcttcaacacctttgttattttttagaacgagaagattttcaacttccaaatgccaaataggataataagcagtagcagcgccgccacgaattccaccctgtgagcatgatttaacagcagtctgaaaatgtttccaaaaaggaataacaccagtatggcggacttcacccatgccaatcttagaaccttcggcacgaatcataccaacgttaataccaattccagcgcgtttagagatatattcaacaattgaagctgaagccttattaatagacttcagcgaatcacctgcctcaataacaacacatgaactaaactgtcgagtcggagtacgacaaccagccataataggagttggtaatgaaatctgtcgagtagatactgcttcataaaaacgaataacatgttttaatctatcaacaggttcatcttgatgcagtgccattccaatagtcataaatgcaaactgcggagtttcataaatttgaccagtggttttatctttaactagatatttttcttttaattgcatcgcaccggaataagtaaattccatatcccgctcgtgcttaatttttgattctaaaaatgtaatttcttctgctgaatattttgacagcagttcagggtcatatttaccttcatttacacagtaagaaatatggtcaataaatgaacgtggttcatattgtccgtaaacatgcttacgaagagcaaacattaaacagcgagcggctacgtattgataatcaggctcttcaactgaaatagaattcgcagcagccttaattacaatggtttgaatgtcatcagtggtcattccatcacggagatatgatttaatattttcatataattcataaggatctacagatgttccttcggctgcccaagataaaactttaataattttttgcgggtcaaagctctgagaaacaccactacttttgataacattaattaattgcataagtcctcaacttgaaaatcgtctttaaacaatcggttaactatatgagctattatatcaccatgacacggctttggtttacatgtgcatcctagcctcattccacgtaaaggctctaaatgtgctttagttatttctccggatttaattcgacgtataaaatcttttttgaataattcaatggcagcctcccggctgccagcatctttaccgacgtaatttccccaaaatgtaccacggtgaatattaacatcaaagtcggatttatatttattcactacctggcatagacggcccgcgcggcgataattcgtcatattgtttttccgttaatacagtaatatcatagtaacaatcggaagaagttttaactgtggaaattttattatcaaaatactcacgagtcattttatgagtatagtattttttaccataaatggtaataggctgttctggtcctggaacttctaactcgcttgggttaggaagtgtaaaaagaacggcaccagaagtatctttaaatcgtaaaatcatattgccattttccctttaattgctggatgcgattcataattttcaaggataaaatctttcggtttcatgtattcagttaaccagtaaagctgtgtttcggtgtcacaattttcaaactctataggccaatcaattttaagttcgcacagttctttaggctcacggcgtaaaatttctttacattgttctacgtgattcatatagatatgagtattaccaccagaaaatatcaaatctcctgggataagattacacatcttagccataatatgcgtcaaggcagcgtacgaggcaatgttgaatggcaagcccaagaaaacatctacacttctttggtaccattgtaaatcaagataaccattacgcacattaaactgatagaacatatgacagggcggtaatgccatttgattgatttcagctggattccatgctgaaacgatttgacgtcgatcagttggtaattttttaatacgatcaatagtttcaactaattgatccacaccaccgaaatcacgccattgtttaccgtatataggaccaagttcaccactatgatatcctaggtctttagcttggttttcataattgtcatcccagatagttttaccttgaataagactaccatgagtaagaagacgtaaatcattaacattggtagaaccagaaataaaccataaaagctcagcaatgcatgcattccaggcgagctttttagttgttactgcaggaaagcctttagttaaatcccagcgtaatttagtaccgaacaaagcaattgttcctgtgcctgttcggtcatcagtttcatagccattttcaaaaatgtctttaattaaatcttggtattgtttcatttagtaccttatataaattataatacattttatgaagctaaataatcaatacggtttagcatcaaattttctctcaatttcaggcgtgaaatataattctttaccgcgtttggaaaagcgaccaataatatgataattattctcatcagacgtgatattaccaatatccatagctttcaaccaaatatcgatatttctatccaactttatgtcaaaattccaatatggagaactattaccgaaaatactgcaagcggattcagtaaaacaactgctataaatcttgtctttaggaactactaattgatagacgcctttaataaactgaggaccctgccatttaggttgtttctcatctttttctaatagaatagggtaataattaaaattcatatttccgccacgcgttatttcatttatatactgattccgtaagggttgttacttcatctattttataccaatgagtttcaaccatttcacgcttgcttatatcatcaagaaaacttgcatctaattgaaccgttgaattaacacgatgccttttaacgatgcgggaaacaactacttcatccgcataaggtaacgcagcatatagtagagcgggtcctccaattacactgatgcgattttcgttgtcatcgataaacgttttaaaatttgtgttaggactggataattggatgcgtccaccggctaataaggtaacatactcatcccaggtaatataaaaatgagccaaatcgccatctttagtttcaggatagccgcgtttaatatcacataccaccacatgactacgaccaggaagtaatgtaggcaatgactggaacgttttagcacccataatcataatcgtaccttcagtacgagctttaaaattctggaggtcctttttaactcgtccccatggaagtccatcacctaaaccgaatgctaattcatcaaagccttcgactgttttagttggagaataggcgaataccaattcaatcattacgcaaatcctctttcgataaaccattcagtggctttattagcgtcaaagaataattcttcatatgtcttttctttgttttcaaagactgtcacacaaacacgttgacattctccgcagtattcttctgacatactcaaagcgtcagaaaacatttcattaaattcatttaaatcaggattatgcaatgcgttaaaaattgcataatcaaattcatcattcataaattcaaatacaaaaatcatattacctcccactgaaaggggccataagcaaatccgctatctttaatcattttaattaacgttaacattcctttgttaactgctcgtgagatttcatcaaaaacttcatcactatcaccataaagatcgctaaaaagttctaacacgttcttctgaacttttaatttacaaccaacaaattcgcctacagtaaattcgtttccgccaactccagcgtaaaacgtaattacaccagttaatggtctttcactagaacataggtcgtgtgataaattaatataagccgtcccgggcgcagttttaagttggcaacgaatacttactcgagaaattccagctacacgaatgtcagacatattattttcctcaaacagactttttcacaattttccaatcagctttaaactgatcaacatcagaatgataaatccaaaatcctgcgctttcaccatcttcataaagcggacatccatcgcattcatcttcccatcccatatcacgtaaaagatgttcagctttttcaacaagttcagaatctttaccgatgatattaaaataccatttacctctaacttccgaatctttgatgctctgacgttgtaatctcattttattctcctcaagttgataaggctatagtatcattaccatagcctgttgtaaacatttatttttgaattttatcgagccacttaccaagcttaatcatttctttagtagccttttccatacttctgaacttaaccaatagaggataggtatcgacacccataactaaattggttgcaagactgtgttcacccacaagccataacgaatacgtttgaatatcgagtccgtaatttctgtctttatggacccgtacacccatcacttcaaatttctcactagctttttctaccgcatccaggaaatcatctttagtcatattaggccttaaaagtttttcgcaaaagttcaatgatttcatctacattgttttcgtcaacaatacagtgaatttttgttacgccagaaactataccttcattagcggattgaggcttttctaaagttacctcagtaaagtatttgaattcttcagagtaaatctcaaaatacgtctcaagtgggccaccagccatgtattcagtgccatcttccatagttacacgtaccacacagtcaccagcacaatcatcactttccatttcatctacaacaaaactaggtccgtgcttctctattaaatttagcatcattacattgcaacggcactcgttagcaaagtcatttttaaataaagggttaatgatataagtttttccaacttccattttgatttcctcattttaatagggcttgatagccccttgataattattgttcaatcagtcccatgtaaaattctgcgtcttcagaatccatgccatcacaatattcattagccataaagcgggtaaggtcttcaagaggaccttcaatgacaatagaaaaattgcaataattgggatcatcatgaatacttgtgatactaagttcaggataacgattacgaataatctcttcaatatattcaaaatcaacgatgtcaatatcaactttagccatattattttcctctttaatcatcagcagtattgccgatagttgtatagtaccatggaaggacaaggatgtaaacagttttgtgaaaaaatttttgaaataaaaaaaggggacctctagggtccccaattaattagtaatataatctattaaaggtcattcaaaaggtcatccaggtccgtgtcatcagcactagatgaactgccagagcttgagctcataaaatcatcttcagtttttgttttgaagtcatcaacattgaatgcatccaaatcatcagcaactttatcagctttcttagcagcagttgcagcggcaccgcccatcacagcagttcccataacttgaccgaatttagtattcagttcttcaaacgatttgaatttatctttagaagtcatttcagaaaggtcaaccatttgttcgaacagttctttctggaaagattcatcatcaatgtttggaatcgcagattgattcaggaatttagattcgtcgtagttactaaaaccagaaacttgtttaactttcagtacaaagttagcaccttcccacggacaagttacatcaaccggagtttcacccatttcaacatcaactgcaatcattgcgttgattttatcccagattttcttaccgaaacggtatttaaatactttaccttcattttctggagcagccgggtcttttactacaagaatgttagcccagtaagaagttttacgtttaacaagaccgtattctttattgtcagtgttgtacaaatcatttttactgatgtactgacatactggacaagaatcgtaatcaccgtgagtagatgaacagttttcaatataccatttaccatttttcttgaaaccgtgatttacaagaattgcgaatggtgcttgttcatcatttttagacggaagaaaacgaattactgcttgaccgttacccgcattatcgagtttcagtttccactcgcctttatcttcagaagaaaaaccacctttatttccagccagtttagccatttgtgcagcgagttcagcagtagatttacgtttaaacatttttatttcctttttaatttaattaacagttggtgctatgacgatgtatgacctcatagctggtcagtgagataattataatctatttataataagcaattaatacttgcaagatttcacagtttcaatgaaaacacttttagctttctgtgaatcaatatttaaaatttttctataagcctttaactttatagaataattattccagactaaattatcagtctgttcatcatgtttatcgattatatttaaaaacgaatcaagcaagataaacgtctcaaacgaaattatattcgattgaagtagtttaaaaatataacttgattgaacttttggattatactcaaagatttctttaaaagcagaaacttcaacttttttactaaaataatagatattcctaatatcttcttcaaacttaaatttaatttgctttaagcgtccgatatattcacgataaaacacaagtgcatcagcgtcagagatgtcaccaatccaagcatcctggttagcaaccaaattacttataaagattaaagcaagttcctttaatttatatttttctgataacttctggaaaaaatacttatcccttcgcttttgataagcggcatcagacacccgcatgcaccaattatacttaataacatcatactttccattcatatgttgttttatcattaagtataatttataaactgatttaccatcaatatatctttcacctccagcaggcatgcggagtttaatcatagcagaaaatctaatgtattagttttttcacaacgaacaacagaaggacgtaaaagattttcgtcaatggcttctgactgaattttttcaattatacctgaaggaataaatttagcaaattgagtttcaggaatagaattttcttccaagaatgctgttgtagcttcaagataactcattccaaactcttctaccattttttcaataataaatccattttcttgacgatcaagaagctttgctatttcatccttttctttcttaattgaaagttctttttctgaaagaccggtctcatcgaccggacgaatatcatttagagaaaactgtgtcataaagttcaactacctcttcagtttcagcttcaaacacatcacggttatctttatgatacaaagctaatagacgattaaacatcttaccatcaacgccaagttcatctttggcacgaattcgaatatctttaatcagttcattataaccggaaattttcagtttatgatcagatgcttctttaataaatttagccaagtcttcgccatggatagcttcatcaaattcaaccatttcttttttagccattattcacctcaaaattcattaatgctgttagttaatttagaaagaccagattttacaaaataagaataaattttgccacgcggtggtaatttatatgaattatagtaattcacaatgtttgaagcaatattatcaggaatataatcaaaatcaattagaactaaattttctttataacgattatattcagattctgtgagaagcaccttagcttgttcacggtcattagcaatagcttcaacgattgaagttttcattgaaggagttcgttcaccttcaactttggtaaaccaaaagtcagatcgtactttaactgaagcaacgttatcctttttgtcacctttaaggattttagtcatacagtcaatttcagcagaaccgcttttaattttaacccatttcttatgcatcggtgaccattgcttaacatttggatatttgtgaagctgcgtaaagtcaccatccgatgaaatgattaaaatcttgtgtccttctaaagagaactttttaacaagtactgcaatgtggtcatctgcttcatacttatcaatatccataacaatgtatggcatataagctttcaattcatctataactttatggctggattcaaaataaccttcccagtcccaagtcgattcttctcgtgcttttccacggtttttcttataataatacgcgaaatcacgacgccagtatccagatttcgcattatcaatacacagtacaattttagtgtatccaagagtttttgcttttttgacattaaacttaattgagttcaatatcaaatgacgaaccattgataaattaattttttctttatctggaaagtttactaaagcagttgaaagcgcaatttgactaaagtcaataaagcaaattccttctttgtaatcttcatccagcatcatttctaaatccatatgaacctcgttcaattagtgagatttctattatataccatccaaatcttaaagtaaacaagtataaatacttattattgaaaacacaataggagcccgggagaatggccgagattaaaagaaagttcagagcagaagacggtctggacgcaggtggcgataaaataatcaacgtagctttagctgatcgtaccgtaggaactgacggtgttaacgttgattacttaattcaagaaaacacagttcaacaatatgatccaactcgtggatatttaaaagattttgtaatcatttatgataaccgtttttgggctgctataaatgatattccaaaaccagcaggagcttttaatagcgtacgatggagagcgttacgtactgatgcaaactggacaactgtttcgtcaggaccttatcaattaaaatcaggcgaatcgatttcagttaacactgcagcgggtaatgacattacatttactttgccatcttctccaattgatggtgatactatcgttctccaagatattggaggaaaacctggagttaaccaggttttaattacagctccggtacaaagcattgtaaactttagaggtcaacaagtacgctcagtactaatgactcatccaaaatcacagatagttttaatttttagtaatcgtctgtggcaaatgtatgttgctgattatagcagagaagcggcagttgtaacgccagcgagtctttatcaagcgcaatcaaacgattttatcgtgcgtagatttacttctgcttcagcaattaatattaaacttcctagatttgctaatcatggggatattattaattttgttgatttagataaattaaatccgttatatcatactatcgttactacatacgatgaaacgacttcagtacaagaagttggaactcattctattgaaggccgtacatctattgatggtttcttaatgtttgatgataatgagaaattgtggagattgtttgacggggatagtaaagcacgtttacgcattataacgactaattctaatattcgtccaaatgaagaagtcatggtatttggcgcgaataatggaacaacccaaacaattgaacttcagcttccaactgatatttctatcggtgatactgttaagatttccatgaattatatgagaaaaggacaaacagttaaaatcaaagctgccggtgaagataaaattgcttcttcagttcaattgctgcaatttccaaaacgttcagaatacccacctgaaactaaatgggtgactgttcaagaattagtttttaatggcgaaaccaattatgttccagttttacagcttgcttatattgaagattccgatggaaaatattgggttgtacagcaaaacgttccaactgtagaaagagtagactctttaaataattctactagagcaagattaggcgtaattgctttagctacacaggctcaagctaatgctgatctagaaaattctccacaaaaagaactggcaattactccagaaacgctagctaatcgtactgctacagaaactcgtagaggtattgcaagaatagcaacaactgcgcaagtaaaccaggataccacattctcttttgcagatgaccttatcatcactcctaaaaagttgaatgaaagaactgctacagaaactcgcagaggtgtcgcagaaattgctacgcaacaggaaactaatacaggtactgatgatactacaatcattactcctaaaaagcttcaagctcgccaaggttctgaatcattatctggtattgtaacttttgtatctactgcaggtgctactccggcttctagccgtgaattaaatggtacgaatgtttataataaaaacactaataacttagttgtttcacctaaagccttggatcagtataaagctactccaacacagcaaggtgcggtaattttagcagttgaaagtgaagtaattgctggacaaagtcaagaaggatgggcaaatgcggttgtaacgccagaaacgttacataaaaagacatcaactgatggaagaattggtttaattgaaattgctactcaaagtgaagttaatacaggaactgattatactcgtgcagtcactcctaaaactttaaatgaccgtagagcaactgaaagtttaagtggtatagctgaaattgctacacaagttgaattcgacgcaggcgtcgacgatactcgtatctctacaccattaaaaattaaaactagatttaatagtactgatcgtacttctgttgttgctctatctggattagttgaatcaggaactctctgggaccattatacccttaatattcttgaagcaaatgagacacaacgtggtacacttcgtgtggctacacaagttgaagctgctgctggaaaattagataatgttttaataactcctaaaaagcttttaggtactaaatctaccgaatcacaagaaggtgttattaaagttgcaactcagtctgaaactgtggctggaacgtcagcgaacactgctgtatctccaaaaaatttaaaatggattgtacagagtgaacctacctgggcagctactactgcgataagaggttttgttaaaacttcatctggttcaattacatttgtcggtaatgatacagtcggttctacccaagatttagaactgtatgagaaaaatagctatgcagtatcaccatacgaattaaaccgtgtattagcaaattatttgccattaaaagcaaaagctgcagatagtaatttattggatggtctagattcatctcagttcattcgtagggacattgcgcagacggttaatggttcactaaccttaacccaacaaacgaatctgagtgcccctcttgtatcatctagtactgctacgtttggtggttcagttacagcaaatagtgtactaacgatttctaatactggaacagcaactcgattgatttttgagaaaggacctcaaactggaacaaacccagcccaaacgatgactgttagagtgtggggaaatcaatttagtggggaattagatacaacacgttctaccgtatttgaagttagtgatgaaacatctagtcatttttattctcagcgcaataaagctggaaatataacatttaatatcaacggtacagtaacaccgataaatgttaatgcttcaggaacattgaatgcaaatggcgcagcaacatttggtaattcagtcactgcaactggtgaaattatttctcgaagcgcaaatgctttccgtgctattaacggaaattatggtttcattattcgcaacgatggatcagtaacgaattttatgcttactgcatcgggtgatcagactggtggattcaatggattacgcccattagctattaataatgcatctggtcaagtaacgattggtgaaagcttaatcatcgccaaaggtgctactataaattctggtggtttaactgttaactcgagaattcgttctcaaggtactaaaacatctgacttatatacacgcgcgccaacatctgatactgtaggattctggtcaattgatattaacgattcagctacttataaccagttcccaggttattttaaaatggttgaaaaaactaatgaagtgactggtcttccatatttagaacgtggcgaagaagttaaatctcctggtacactgactcagtttggtaacacacttgattcgctttatcaagattggattacttatccaacgacgccagaagcgcgtaccactcgctggacacgtacatggcagaaaaccaaaaattcttggtcaagttttgttcaggtatttgatggaggtaaccctcctcaaccgtctgatatcggtgctttaccatctgataatgctacaatgggtaatcttactattcgtgatttcttacgaattggtaatgttcgcattattcctgacccagtgaataaaactgttaaatttgaatgggttgaataagaggtattatggaaaaatttatggcagagtttggacaaggatatgtccaaacgccatttttatcggaaagcaattcagtaagatataaaataagtatagcgggttcttgcccgctttctaccgcaggaccatacgttaaatttcaggataatcctgtaggaagtcaaacatttagtgcaggtcttcatttaagagtttttgacccttccacgggagcattggttgatagtaagtcatatgttttttcgacttcaaatgatactacatcagctgcttttgttagtttcatgaattctttttcaagcaatagacttgttgccatattaactagcggaaaggttaattttcctcctgaagtagtatcttggttaagaacggcaggaacatctgcttttccatctgattctttattgtcaagatttgatgtatcatatgctgccttttacacttcttctaaaagagctatcgcactagagcatgttaaactgagtaacagaaaaagcacagatgactatcaaactatattagatgtagtatttgacagtttagaagatgttggagcgacaggatttcctaaaagaacatatgaaagcgttgagcaatttatgtcagctgttggtggaactaataacgaaattgcacgtctacctacagcatctgcaataagtaaactttctgactataatttaattcctggagatgttctttatcttaaagcacaactatatgctgatgctgatttacttgctcttggaactacaaatatatctatccgtttttataatgcatcaaatggatatatttcctcgacacaagctgagtttaccggacaagctgggtcttgggaattaaaagaagattatgtagttgttcctgaaaatgcagtaggatttacgatatacgcacagagaactgcacaagcgggtcaaggcggtatgagaaatttaagcttttctgaagtgtcaagaaatggcggcatttcaaaacctgctgagtttggcgtcaatggtattcgagttaattatatctgcgaatctgcttcacctccagatataatggtacttcctacgcaagcatcgtctaaaactggtaaagtgtttgggcaagaatttagagaagtttaaattgagggagccttcgggctccctttttctttataaatactattaaaataaaggggcatacaatggctgatttaaaagtaggttcaacaactggaggctctgtcatttggcatcaaggaaattttccattgaatccagccggtgacgatgtactctataaatcatttaaaatatattcagaatataataaaccacaagctgctgataacgatttcgtttctaaagctaatggtggtacatatttaaataaagtaatttttaataaaggaatgactgttcctggtgctgggtcaggtgacaacggtatttttgccggtcctggtgataatgccacatatgatactacaaatatggatattgtttcatggtatggtatcggctttaaatcatcacaaggggcagcaggtagaactgtagtaattaacacacgaaacggagatattagctcaaagggtgtaattgaagcatcacaaatacgcgcaacttcgttatcaccagtaaataattatgaccttacgagaaaagattatgttgatggagcaataaatattgttacaacaaatgtaaactctagagtattacgctctggagacactatgacaggaaatttaactgcgccaaaccttttttcacagaatcctgcatctcaaccctcgcatgttccgcgatttgaccaaatcgtaattaaggattctgttcaagatttcggctattattaagaggacttatggctactttaaaacaaatacaatttaaaagaagcaaaacggcaggtcaacgtccagctgcttcagtattagccgaaggtgaattggctataaacttaaaagaccgtgtactttttactaaagatgaccagggaaatattattgatttaggttttgctaaaggcggtagtattgacgggaatgttattcataaaggcaattataaccaaactggcgattatactttaaacggtacattcacccagactggtaattttaatttaaccggtattgctcgagtaactcgtgatattattgctgctgggcagattatgactgaaggcggagaacttattacaaaaagttcaggaacggcacacgttcgttttcatgattccgccgaccgtgaacgcggtattattttttctcctgctaatgacggtttaactacacaagtaattaacatcagagttcaagattacaaagccggttcagaaagcactttcgcttttaatggaaatggtttgttttcttcaccagaagtttttgggtggaaatctgtatcaactccggtaatttataccaataaagttatcaccaataaaaaagttaaagatgattatgacatctattcgatggcagacaatgttccattgtctgaaagcactactgctattaatcatcttcgtgttatgcgtaatgcagttggttctggtattttccatgaagttaaagataatgatggaataacatggtatagtggagatggattagacgcttatctttggtcatttacttggagcggcggaattaaatcaagtcactcaatttccatcggtttaacacccggacctaaggattactcaatattaggaccgtctagtatcgctttaggagataatgatactggatttaaatggcatcaagacggatattatttcagtgttaacaatggcacaaaaacgtttttatttagtccaagcgaaacaactagcctaagaaaatttatagctggatattctactaacggaaccgatttaactactcctccaactgaaaattatgctcttgctactgtagtgacataccatgataataacgcgtttggggatggtcagactcttttaggatattatcaaggcggtaactatcatcattatttccgcggcaagggcactacaaacattaatactcatggcggtttgttagttactccaggcaatattgacgttattggtggttctgttaatatcgatggtagaaataataattcaactttaatgtttaaaggctataccatgggtcaaagctccgttgataacatgtatatagctgtttggggaaatacttttactaatccaagtgaaggcacccgtaaaaatgtcatggaaatttctgatgatattggatggatgcattatattcaacgtaataaagataatacggttgaagccgtgttaaatggtcaacaaacaattaatgaaaatattattgcgaaaaaggatatttgggttgaccgagcagttcataccattggcgaaatcactacaaatgctgttaatggtcttcgtatttggaacaatgattacggagttatttttagacgctcagaagaaagtcttcatattattcctacagcatttggcgaaggagaaaccggtgatattgggcctttacgtcctctcagcgtagctttaaattccggtaaagttactattccagatttacagtcaagttataatacgttcgctgcaaatggttatattaaatttgctggtcatggggctggtgccggtggttatgatattcagtattcacaagctgctcctattttccaagaaatcgatgatgctgctgtaagcaaatattatcctattgttaaacagaagtttttaaacggtaaagccgtttggtctttaggtactgaaattaattctggtacatttgttttacatcatttgaaagaagatggttcacaaggccatacatcaagatttaatgctgatggtacagttaatttccccgataacgttcaagttggcggcggtgaagctactattgctcgtaatggtaatattttctcagatatttggaaatcgtttacttctgcgggagaaaccacaaatattcgcgatgcaatagctactcgtgtttctaaagaaggcgacacgatgactggtaaattgactttatcggcaggcaatgatgctctcattttaactgcgggcgaaggtgcttcatcacatatccgtagtgatgtaggtggtacaggtaactggtatataggcaaaggcggcggcgacaatggtctaggtttttatagttacattacacaaggcggtgtatacataacaaataacggcgaaatatcgctttctcctcaaggtcaaggaacatttaattttaatagagatcgccttcatataaacggtacacaatgggttgcgcaccaagctggtgattggagaaaccaatggcgacaagaagcgccaatatttgtagattttggcaatgtcggtaatgatagttattacccgattatcaaaggaaaatctggtattactaatgaaggatacatatcgggtgttgattttggtatgcgacgcactactaaccaatgggctcaggctattatccgtgttggtaaccaggaaaatggttctgacccacaagctatctatgaatttcaccacaatggagttctgtatgctcctaatatggttcaagctggagcaagattatcagctggcggtggtgaccctgtatggaccggcccgtgtcttgttattggtgataatgatactggattagttcatggtggtgacggccgaatcaatatggttgcaaatggagcgcatattgcttcgtggtcttcatcttatcattctcatcctggcctttgggattcaaatggagctttttggacagaagttggcaaagcaattatttctcacggccatcttgtccaggcgaatgacagttattccacatatgtccgcgatgtttatgtccgttctgatattcgtgttaaaaaagaccttgttaaatttgaaaatgcttcacaaacactttcaaaaattaacggttacacttatatgcagaagcgaggcctagatgaagaaggcaatcagaaatgggaacctaacgccggtttgatagctcaagaagttcaagctattttgcctgaattagttgaaggtgaccctgatggcgaagctttacttcgtttgaactataacggtgtaattggtttaaatacagctgcaatcaatgagcatactgcagaaattgcggaacttaaatcagaaattgaagaacttaaagcattagttaaatcattgttaaaataataagaggggcttcggccccttggaggtttatatggcagtagcaggaccgtgggtaggatcgtctgcagtagttaatacaggacaaaattggatgggcggcgcggcccaacgattaagaatgggcattccgttctggatgagtaatatgataggtcgatctgttgaagtaattcacacgcttggagcagaccataacttcaatggtcaatggttccgagatagatgttttgaggcaggtagtgcacctatagtgtttaatatcactggagatttagtatcatattctagagacgttcctttattcttcatgtacggagatacaccgaatgaatatgttcaattgaatatacacggcgtaacgatgtatggtcgcggcgggtatggttgggctgctggggcgattggagcggctggcgggggggtatgtatcccaaatgatataggggggcgcccccgcattcataatgggggggctattgctgaaggcggcggcgggggggggggggatttgccagccaataaaatggcgggggaagatggtgtgggtattgcacctatagtgtttaatatcacttgatatttagtatcatattctagaggctttcctttattcttcatgttcggagatgcaccgaatgaatatgttcaattgaatatacacggcgtaacgatgtatggtcgcggcgggaatggttgggctgctggagcgattggagcgtctgacggtggtgtatgtatccaaaatgatataggtggacgcctacgaattaataatgggggagctattgctggaggcggcggcggtggcggtggatattcgcaagccaataactgggcaggaaaatatgtatgtggaggcggcggtggtcgtccatttggtttaggcggaaataatggtgctcgatggcctggtggaaatgctagcttaacagcacctggtgctggtggtaatactggccaatattgggctggcggtggaggtgaagttggtcaaccaggtcaatatgctaatccaggtaatggttattcaacacctccgacaaatcctggtgctgctgtagcaggatcggctccaacatggcaaaacgttggagccgtatacggttcaagagtataatttttgaataaatatccttaaaaggagggtctatggcagcacctagaatatcattttcgccctctgatattctatttggtgttctagatcgcttgttcaaagataacgctaccgggaaagttcttgcttcccgggtagctgtcgtagttcttttgtttatgatggcgattgtttggtataggggagatagtttctttgagtactataagcaatcaaagtatgaaacatacagtgaaattattgaaaaggaaagaaatgcacgctttgaatctgtcgccctggaacaactccagatagttcacatatcatctgaggcagactttagtgcggtgtattctttccgccctaaaaacttaaactattttgtcgatattatagcatatgaaggaaaattaccttcaacaataagtgaaaaatcacttggaggatatcctgttgataaaactatggatgaatatgcagttcatttaaatggacgtcattattattccaactcaaaatttgcttttttaccaactaaaaagcctactcccgaaataaactacatgtacagttgtccatattttaatttggataatatctatgctggaacgataaccatgtactggtatagaaatgatcatataagtaatgaccgccttgaatcaatatgcgcccaggcggccagaatattaggaagggctaaataattatttgttcgtatacatctctagatatcgatatacaccctcaaaaccctcgttgaattcgtcgatgagggttttcttatcttcttgagttaattcagaaacaattttacggaatgaattctgatttaattttctaccttcatgtgttactccaatctcattcagaaatgcaataaaattagcacgattttcaacaatatcttctctggaaaatttaatcaaaatagacgcaacagtaataatttcacgaactgtatcaatatttttattcattaactataccactcaattagttgactttgttataatatcatcagacgcttgatttgtaaactggtctgtgttattttcttcaaaaattttttctacgaattccttgaacgacttacgttcctgagctacattatgctcgattactttttcaagattatgactcattcgaaataatcttcaatttcataatcatggacgtaaatcattatagtttttaatacatcatcaatactttttcctggtgctggaattacgtagaaatatcctgcttttgaaaggtctttataagttccaatcaagaaatcattattctcgagatgtaattcttcaactaattcattaacaattgagtggtataaatttggtagaaacttatatagcttttctagaatatcaattttgattgtgtattgaaccacagactgagaatcaataatcatagaccttccccttatgtttctgtttgcgattagattctttaaacgctttcttcttatccttatgaacagaagctttattaaaattatgttttgcgactaaattgttcataatgctgaattacctctcttaaacatttgcatgtgaatgagaactttttagctacaccacactcaaatatatgttctcttaaatcacgtgtatcagtatatcccatctcaacaataaaatgccttattagatttttatctttatcattgagagaattaaaataatcagattttgaattaatttccctggccaaattgaatcaccttcagttgacgttttaattcttttatcatttcttcgttcatcgcaatataaagatcgcgtaaagcaggttttagcattccatttaccggagaactaaatgggcatacataatcttttcctacaagctttttggtaaattccatatcacaaaatttaaatgccggctcattcgcataaattccccaattagttgacatcattttattggcatattccagtgcctgaatttgattcataattccatcaatttgaaactttttaatattcattagtaaaggtcctcagagtaaagttctttttcactaccaccacgttcaatacgtacttgtccagcgtaagttgcaataatcattgcttcttcacgtgtccaataattactgtattggtcaataaacccttggtcatcatcacaaacttgttgagtaactaattgaggtttaactacatctaaaacttctgccatatctttagaataatgacgagcacctggaataacgagagttcgtccatcttttaatttaaaacggttggctgcgcagacaattcgtcgttgatacttttggttttcatcccaatacgcagtctgccaacatatttcaggaacttcatctaaaacattttgttctgtatattcaccgccgtaagaagctaatttagcagccagactttccggagtctcacgtaacaaagctttatctaacagagctaaacgttctttaaaagttttcatttaaaccatcctttaatacgttgccacaaagttttctgttgagctttgttaacaccaattgagcgaataaccggttgagattcctggaattctttataatcagcaagataaatttcgtaagctgcatctgtaaaggaacttatcgctgccataaaattattgcgaatacctactggagcatctttactttcacgaataatcatgtatttaccagtcttaatctttacgatagttccaagataagctccatgataccagatgtcccaaccctcttgagtaggttctgcacaacgacgaagttcattgacaatttctaacttgttcattatttattcctcacagttcagatgctacagtgattactgcttcaatgttttctgccgaacgtttaatgtcaagatacacattaccgtttttagcgattttacaagacattccgatatcggtaaatttctgaatatgatgttccatcattttgtatccaaaaattcgcatgtttccattattgttaatttcaaaattgcgaattccgtgagtgcgtttttctaaaatagcaagatagttactgcggtaagtttcaacctttttaagaacaaatccattttcatctaaaagttttaacatgaggtctttatcttcttccatatcagaagtaatctcacgagctttacgagtagcacgttttttcagaagttctggagcattttcctgcgcatataaagttgctgcatttgaaataatatcttgcgcttcgcctgtaatgattaatccatcacctgatttctctaccaggccttttttaattaataccccaatattactattaactactgcgttacctaaatctggatgcacctcacgaacttctgcagctgtaatgaaatctttcttagcaatagtaattaaaatcgcagcagttttttcattcagaacatcgttagaagctttgatgatgtaagttactttagacattttctaatctccgtaattctgtatcagtagttgataattatatagtaccacagtatgctttggttgtaaaccgttttgtgaaaaaaattttaaaataaaaagggagagccgaggctctccctaaaaattactgcatgactgtgataactgtcatgataacacgttgaattccgaacgcaagaagacctcctgctacggctggaacaacacctaaacccgccagtaaaatgctaccggatactaatgcagcgcttgtaatacctatgaatggactcatttgatttcctctaaatctttggtgtattctgtaactacatcagtagttttccaatattcgttttcttcttttttagctttagcttcttcagcaagtttctttgcttcatcagaagtcatatgaaaaatattcattccaaccagtttatcaacataagaagaatacatatcaattttagaaagttcttcggtcagttctttgcgagttttaccttgcacaacaatttcacctgaaattactttcttaatgaaatgtgccttggcaaaggctaaacgaaaagctgactcagtttctttgattttgttatcaattcgtttttggacataagttttacgaacttcaacaaagtctttaattaaatcaactacgttatcgtaaacttgtagttttcctttctcattaataaccgtaatattctgagaacgacgctcaatcaacccgaagtctttcataatttttgcatggcgttcttcttcgttatcgctcaaagaatattctttacggaatttaactttgaatccaaaaccatgctcaccacaagcatcatcccatgtaatgaagcctttatcttcaagtgggtctaagattttactcacataagtttcacgatcatacttatacggaatctcagtgatatgcatttgagttcgtgaagtaaacttatatgttccacgaatttcatattggccatcaatctcaacgacttcaccacgaaattctgggaattctaccttcggtttagttactttctttccttgaagagcttgtaatacagctttcttaacagaagaaacactatgaggaagaatgtaagttgcataaccagttgcaataccggaaacaccattaagaagaacagtaggaataataggcaaatagaaagcaggcggaatgtgttctttatcttgatgtaccggagcatattcagtatctttatatacgttatagaaatttttacttacacgagcaaaaatataacgacttgctgctgctttttggacggtacgagaaccaaagtttccttgaccatctaacagaggaaaattattattccaagtgttagccatcaaagcacctgcgtcttgcgcagagttttcaccatgatgatatccaaggtccgctacaccacctgcaatagaagcgagtttgtgaaacttatctttatttcctcgtgccaaatcaagagctcgagcaataacaaatcgttgaactggcttaaatccgtcaatcatatttggaatggcacgattttcaaccgtgtacatagcataagccaatgcttcattatcaatgatactttttaaatcgcgattattcagttgcataaatttaccatactagtgaatgtagtgccataataacatcagaaatgaaaagcacgacttgaattaatccgaacattactccataatatagtgctactaataaagtagcaagggctaatgaatagcccaagattttcttaatcattttcatttaatagccaaaacaatgataaaattgctaatacgccttgagctgttgcttgtaaaaatactgaagtttctccagttattactgttccggcgaataaaaaggaccagcagaaaaaggctataccataaacaaatttcatattttcctcactggcgtccgaagacgcctttagttttaaaattattacgatagaactgcatcacatgttcgttatggaaattactcattaatatgcctgcaaaacgaatttaaagttatcagccaacatacggttcatttcttcaagtgtttgatactcagaatgatgattacgagtaaacgctaaagctaactgtccttttccaaatcccgtcgtcagaggtttcatcttagaagcaggcagataaaacactgtgtatggaacattgttatttgcaatagtacgtgcaagctgagaccgacgttgacgaatatgacttagaactgcactgaatccttgcttagaacgctgattacctacataaaatcgtgctgacacacatggattactaaatggacgaccatctaatttacttactaaaaagtaaaatccaggtttagataaaatatctttatgcggagttcccaaaaaccactcaccacccttgattgtaccaataacagtagcacctgcatcattcagatcagtaacagtcatatatttcatattaatttcctctaaattattttctactccaaggccgcatgaatacgcggccattaaattaatcgtcgcagtcgacgctcaattcccaaaactcttctacggtataagtttcagtatcattttcaatacagaaacgttcattactattgtttgctaaagtagcgttaactgtcattttttcgctagtgctcttaagaggtgaaatacgaattaactgatcgccgttatctaaacaaaaaatttcaccaacttttacatctttaaagattttcataattcacctcaaggagtataaaatccaaatgcagttgttgaccatcccatccaatatggaaaatttgcaccaatgtaaaacataagaatataaaaccaaccgctcaacaaattcatcattttacaccattccaaattgtttcaactacggattttaaaccattttgatgaatatccattccgactactgccatcaaatagattccaactacaactgaacctaaggcgaaaatcagcataaaaatgaataaagccggaaaaatattatcgaaaaaccattcaataaatgtaaaagcaccgcgtttacgcttcatattttcctcacataaatccaaaataagcgtttaacatatcaatcattaaaacgattgggaatatactcaaaactattagtattataactacattccatatagctttaacaatctttttcattttctgttcctccgtagttgatagggtaataataccacagaggagcagtcttgtaaacaactttttaaaaatattcgtaataaatgtgaataccaatcaccactgctgaaacttgtgcaacccaccacgcgcaagcaataagtacagaattcataattttcataataacctcattacaaaagtaaatgttaaacaaattactggaatactaattaaccaaacaaaacaccaccataatgaactcatagttcaatctcagcgattttcatttcattactattaatagccgctttaagactatctgaaagaattacattccagtggtcattcatatgaccattaactaagcgtgtaatttcttcgggagttgaaaaataaggcgtatcagactcccaatgcgataatcctaagcgagtataaatcataccttcatcatcgctagaatattcaactgacacaaactcatcagttattttatgtttagcgtaataaaatttaaatttcattttccgctcctccgtagttgatagttgtatattaccacggtccttgtggtatgtaaaccgttttgtgaaaatttttaaatggaaagataccatccgttgtagttgctttttcttacaaccttacgaaggtcttctctgtcaccgatgaacttcggagtgtactggatgacacctggatgaatttctttagtgttgaatataattatacagtcagcgacttgatgatttagaatgggccctagatttattccagaaccatatggatactctccgctgcatcccgttgttaccgaaatccaacgcgagtcagtttgatgtgtcttaacttctacacgaagcccgcagtatcttggatgcgccaatacatcccatgcgtatgtatacgggtcattaacgtcctcttggcctttgttaacatacccgcttagccaatctgctacaaaaaactctgcgtacaccgcgatacggcatctttcgataacttctgctttatcctggttcgggttttgttttaaagagtatcttgctgtatcagcaattttgaccttcatttcactagtcaaatcactgttcgatagggtaaatgtcggaatctgaaatagtctctgtaaacccggattcgttttctgcatttagactttcctttttaccgctgagataagcgttatatactttaagagtgccgtaataaattcggtcattttcatctaaagactcacggtcaagttcatcgagttcctttttatccatgactataacatcattgcaataaagaaacccaagttttttgtgtccaaactcaaatttattacagtacacaatattagcgtgatgattaccatgtagagaaatttcttttatgtcggaatcaccgatattcatacaataaatcataattcaccttaaaacaaaagggccgaagcccttatttaaattgtgcaattcttttctctagacactcagcataagatttcattgagatgaactgtgaaagcagcagttcttgctcaactgcactaaccgttagaaactttgcgctttctaaaaatttgctcagtgcattaattttgagcattaattgatcgtattcttcttttactcgtgcttgataacctaacataattttccttagttaagggccgaagcccttatttaaattgttcagtaacgtcttcaattacttcgtattggcaggtacgcattttagcgtcgttgtaatcaatcggaattgatactacatcacgaggatgaactttaacttttacaactcggctggttgaaccaccgaagtgacgaatataagatttagaacacacatgcagaccacgagaacaagtttgtgtatcatcgtcatttacacgagtacgtggcattttaactactttaccaggactgttatcaaaggtatttgagtgacagtcaaagtaattgctacgaactactttccaagcatagaagtaaccatcttctgtaatttcaatatcgtttgctaccaagaaatcaaaaagtcgagataccgctttctggcttgggttttccagcagattttccaagaacggaaaataaaattcaaagttttcgcctttttccatcgaatcaagaatacgatcaaccaaaccagaccgcaattcaatattttgatagaataagcttccaccttcaattcgaacatcgccggaaatatatttttcaacagcgcgacgaacattaattttttgtgccgcttcttccagcttatccgctacaagcagattgagaatttcctggaagtttgaatgagtattaggtgttgcattataagttacaccatcgacagtaatcgaaatgaattttttagatgcattccaaataatgtcagatttagtaactggagcaataactgcatcgctattaactttaactgtaatatcaccgctaatagtaactttagagcgtttagcttcttcagcatttttcaaaacacgacggattgtatcaaccgatacaccttgccaatcagccaattcctgctgagtataattaccgcttgaatacagtttaacaatttcagcttgttcgtttttggtcaggcatttaatattgtacataattttcctta

SEQ ID NO: 2 - DNA, 134587 bp, Escherichia coli phage ECCR-664
  source 1..134587: mol_type = genomic DNA
tgtagcaatttgaatatgtagcttgactgaacgttgttattataatcaaatatttcttgaagcgcactaacttcaactttcttactgaaatagtagatgttacgtacgtcttcagcaaacgactctttagcttgtttgagacgtccaatatattccctatagaaaactaatgcatcagcgtctgatatctcaccaatccatgcgtcttggttagcaactaagttgcttatgaatatcaaggtgagttccttcaatttatatttctctgatagtttttcaaagaaatatttatctcggcgtttttgatacgcattatctgaaacacgcatgcaccagttatatttgattacgtcataccgaccaccaaagtggtttttgcacatcaagtatagtttatatactgatttaccgttaatataacgttctccatcaggaggcatacgtattttaatcataataagaaatctaatgtattagttttttcaccacgagcaactgatggggcgaagcatgttttcgtcaattgcttcgcttgtaattttttcaacaattcctgtaggaataaatttagcaaattgtgtttctggaatagaattttcttccaagaaagcagttgttgcttctaaataagacataccaaattgttcaaccatagattcgataatgaatccgttttcttgacggtcaagcaatttagcgatatcatctttatcatgttttactgctaattcttgttcagataaaccggcctcatcaaccggtttaatatcacttagtgaaaactgtgtcataaagctcgactacctcttcgttttcagcttcaaattggtcacgagcgtctttatgataaagagccaacaaacgattaaacatttttccatcgacgccaagctcttctttagcacgagtacgaatgtctttaatcagttcattataaccagaaattttaagtttgttatcggaagcttccttgactagtttagccagttcttcaccatgcacatcttgattaaattcaactgcttctttcttagccatgtttacctcagaattcattaattacacttgttaatttagaaagaccagattttacaaagtatgaataaatcttgcctttaggttgtggtttatatgaattataatactctataatggttgaagcaatattatcagggatataatcaaaatcaatgagaaccaaattttcttggtatcgtttatattcttctgcacttaatagtacttcagcttgagaacggtcattggcaattgcttcaataatagttgttttcatgctcggagttcgttcaccatcaactctggtaaaccagaagtcgccacgaactcgaacagatgcaacgccatctttacggtcgcctttaagaattttagtcatgcaatcaatttcagcagaaccgttcttaattttaacccattttttctgtggtggcgaccattgtttaacgttaggatatttgtgtaattgtgtaaagtcaccatctgatgcaacaatacataccttatgtccagctaatgacaaatatttagttaatacaccgatatggtcatccgcttcatacttgtcaatatccattacaacgtatggcatgtatttcttaatctcatcaacaactttatggagtgcagtaaaatatccttcccaatcccactttgaagcttcacgatcggttttacgatttttcttgtaatagtaagcaaaatcacgtcgccaataacctgaagtagcattatccatacacaatacaaattttgtatagccttgcttacggaacatcactacgtttttacgaattgaattcaagattacatggcgaaccatcggaacagtaattttatcgccgtcttcaaagttgtttaatgcggctgccaacgcaatgttactaaagtcagcaagtgcaataccttctttgtaatcttcatccaacatcatttctaaatccatatgaacctcttgttcagttagtcaacttgtctatagtaacacacactcatttgaaagcgtaaactggtataaataagtattattgaaacaataaaggaaaaacgaatggccgacatcaaacgtaagttcagagccgaagacggtctggacgccggtggcgacaagattgttaacgtagcattagccgaccgtacagtaggtactgatggcgtaaacgttgacttcctggtacaagaaaacaccgttcaagtatatgattctacgcgtggatataacaaaggatttgttgttctttatgacaaccgtttatatcaagcaataaatgatatcgtgtctccttccggggcatttaaccttttacaatggcgtgcagttcgtaccgatgcacaatggataactgtcgcttctgggacttatcaactttcttcaggtgaatcgatttcggttaacactggtgccggcaatgatatggttttcacgttgccaaatgcgccggttgatggtgacactgttgttttggctgatattggtggaagaaccggggcagttaaagtacagattaacgcgtctgtgcagagtattttaaactttagaggcgaacaagttcgtacagttttaatgacgcgtccgcgttcacaactagtgtttgtgtttagtaatcgtttgtggcagatgtatatcattgattacggtaaagaatcaatcactgttacacctgctacaccatatcaagcgcaagcaaacgattttattgttcttcgttttactagtgcagcaccaatcaacattacacttccacgtaatgctaacaatggtgatataatcagcctagttgatttagataaattaaacccactgtatcatacgattattaaaacatttgatgatacaacgtctattggcgaagtcgggactcatatcgtcgaaggcagaacttcttctgacgcgtttttgtttttgatgctgcaaataatttatggcgtatatgggaaggcgaccagaaatcacgtcttcgtattatccgtacagattcaaatattcgcccaaatgaagaagttcttatttttggtacaaataacgctacagcagaaactattaaccttacgcttcctacaggaattttgaccggtgacactgttaaaatttcaatgaactacatgcgtaaaggccaaacagtaaaaattaaagctgccgaaggtgatacaattgcttcttctgtcgcattacttcagttccctaaacgttctgaatatccacctgatgctcaatgggtctctgttactgaactagaattcaatggcactacttcatatgttcctgtattagaattagcgtatatcgaagacaccgattctgacactcattattgggttgtgcaacagaatgtccctacggtagaacgtgttgatgctggaactgatgctacacgagctcgtttaggtgttattgctcttgctactcaagcgcaagcaaatgttgatttagagaatactccagctaaagaagtggctattactcctgaaacgttggcaaatcgtacaagcaactgaagctcgacgtggtatcgctaaaattgctacaacagcacaagttaaccagaattccacagcagcatttgtggacgatactattgttacgcctaaaaattaaatgagcgtacagcaactgaaactcgtcgtggtcttgctgaaattgctactcaggttgaaaccgatgctggtcttgatgacacaacgattattacacctaagaaattacaggcacgtcagggttctgaaacactgtctggtatagttaaatatgtatcaactacttctgctactcctgctgaaactcgtggggctgcaggcactaacgtttataataaaaccgtaaataatttaactatttctcctaaagcccttgaccaatataaagcaacttatgctcaacaaggtgcagtaattttagctgttgatagtgaagtaattgctggtcaatcacaagcaggttattctcacgctgtagtaactcctgaaacactacataagaaaacttctacctgatggacgtattggtttaattgaaattgctacgcaagcagaaactaatgctgggactgattatacacgtgcagtaacgcctaagacgttaaatgataggaaagctacggaaggattatccggcatagccgaacttgctacgcaagttgaatttgatactggaactgatgatactcgtatctcgactccactgaaaattaaaactcattttgattcttctgaccgtaccagtgttaattctgattccggacttattgaagaaggaaccttgtggaaccattatactcttgatatttctaaagcaaatgaaacacaacgtggtacacttcgcgtagcgactcaggcagaatctaatgcaggaactttagatgatgttcttattactcctaaaagcttttagggactaagtccactgaaacgtctgaaggtgtaattaaggttgctactcgggctgaaactgtaacaggaacttctgctaatactgctgtatcgcctaagaaatttaaaatggattgtccagaatgaaccaacatgggctgctactacggcaattcgtggattcgttaaaacttcatccggttctattacattcgttggtaatgatacagttggttcaacacagaacttagagctatacgagaaaaatagctatgcagtatcaccgtatgaattaaaccgtgtattaacaaattacttgccattaaaagcaaaagctgctgactcaaatttattagatggcctagattcatcccagttcattcgtagggacattgcacagacggttaatggttcactaaccttaacccaacaaacgaatctgagtgcccctcttgtatcatctagtactgctacgtttggtgggtcagtttcggcaaatagtacattaactatttctaatactggaacggcaactcgtctgatttttgagaaaggacctcaaactggaactaatccagtgcagacgatgactatcagagtttggggaaatcagtttggtggccggatcagatacaacacgttctactgtatttgaagttggtgatgaaacgtctaatcatttttattctcaacgtaataaagatgggaatatagcgtttagcattaatggtactgtgatgccaataaatgttaacgcttcgggttcattgaatgcgaatggcgtagcaacatttggtagttcagttactgctaatggcgaattcatcagcaagtctgcaaatgctttcagagcaataaacggtgattacggattctttattcgtaatgatgctgctaatacctattttatgctcactgcatccggtgatcagactggcggatttaatggattacgtcctttggctattaataatgcatctggtcaagtaacgattggtgaaagcttaatcattgccaaaggtgctactataaattcaggtggtttaactgttaactcgagaattcgttctcagggttctaaaactgctgatttatacactcgtgctcctactgctgatacagtcgggttctggtcagttgacattaacgattcagccacttataaccaattcccgggttattttaaaatggttgaaaaaactaatgaagtgtctggacttccgtacttagaacgtggtgaagaagttaaatcccctggtactttgactcagtttggtaatacgcttgattctctttaccaagattggattacttatccaacgacaccggaagcgcgtaccactcgctggactcgcacatggcagaaaactaaaaattcttggtcaagttttgttcaggtatttgatggtggaaaccctccccaaccttctgatattggtgctttaccttctgataatgcaacaattggaaacttgacgataagggatttcttaaggattggtaacgtccgcattattccagaccctgtgaataaatctgttaaattcgagtggattgaataagaggtattatggaaaaatttatggctaagtttggacaaggatacgtccaaacgccgttttatatatcggaaagcaattcagtacgatttaaattaagcatagcgggctcttgcccgctatcaacatctcctgcttatattaagttccaggataatccacttgggtctcaggtttttccgttggattaaacgttcgtgtaataaaccctacaacaggtacagtagttgaatctaagacatataatttctctactgaaaacgacaccacgtcaagtgcatttgttactttcatggacacatatgcttcaaattttatatttgctcttgttactaacgctaaaacaaactttccacctgaagttcttgcatggtttaataaagccggaagttctgttattccattagctcaacaagttttaaatatagtggacatttcttattcggcattttatatttctggtaagaatgctatagcactagaacatattaagtatagtaataagaagacttcaaccgactatagtacaccacttgatgttgtgtatgacacgatagatgatatcggtgctacgggcttccctagtcgtacgtatgaatcgtcagacacatttttatctgccgttggaggtactaataatgaaattaaaaggatgcctacaacatctcttattacacctctcgccgggtataaattgaagcctggagatttcctttatatgaaattccaactaatggccgatgtcgatttgttagcacaagggacgacacgactttctattcgtttctttaaatctccttctacttcacctatttcatttaaggatacaaactttgatggggctgcaggtgaatggaagatatatgaagactatatagaaattcctgctggtgctgacgggttcacgatttattgttatcgtacagctccagtcgggcaaggtggattaagaaacgttatattcactgaagtatcatgtaatggaagcgtttcaaaacctgccgagtttggtgtaaatggtattcgtgtaaattatgtttcagaatctttaagtgccccagacatataatgacatttacctactcaatcttcaactgatactggtaaggtgtttgggcaagaatttaaagaagcatcagaataaatttagggagacttcggtctcccatttttgtataaatatggtatacatataaggagacaactatggccgatttaaaagctggtagtacaactggcggtgctgtcatatggcatcaaggtaatttccctttaatgccagcaggtgatgacgtcctgtataaaacgtttaaactctattcagaatataataagccacaagctgctgataacgatttcgtttctaaagctaatggtggtacgtatgccgctcgagtaacatttaataatggtgtgcaagtaccttatgctataaacaatacaaacccatgtggtgtttatccaggtaacggtgataatgctacttttgctgtagcaaatattgacatcgtttcgtggaatggtattggttttaaatcatcgcaaggttcagcaggccgaactgttgtaattaatgcacgtaatggtgatattagcacaaaaggcgttgtatctgcttcaggacaagtaagaagcgatatgactgctccggttgcagcaaatgatctcacaagaaaagattatgttgatggacgaataaatattgttacggataacgcaaattcccgtgtattgcgtaaaggcgataccatgactggtactttaacagcaccaaactttttctcacagaatccggcgtctgaggctaatcatgttcctcgtttcgaccagattgtaattaaagattctgttcaagatttcggctattattaagaggacttatggctacattaaaacagatacaatttaaaagaagcaaagtagcaggagttaatcctactgcagcacaattagccgaaggcgaattagcgataaacttaaaagatcgaactctttttactaaagacgacctcggtaatattattagcctaggctttgctaagggcggggatattaacggtaatgtaactccaaaatggagattatttacagaacggtacatataatctcaatggaaatcagtttgtttatgcaggaaaatatattgaatttttacctaaaactgcaggcaatggtgcttgggcaaatcaacatctaaataaagctcctatctttacagatttgagttcaactacttctgtttcagaatatcatccactgattaaacaacgctataaagatggaactttttctgttggtacgttagtaaacgaaggaagttttaaaattcattttatgaatgaatctggtgattcgaaatattggacgtttcgccgtgacggtggatttactgttgatggtggaggtttagcagtatcaggaggtagtataactacatctggaaatattgcagctctcggaaatattacttcgcctcagattaatactaaaaatattattttagacacaaaagcatttggacaatacgattcgcaatcattagttcaatatgtttatcctggaacaggcgaagagaaaatggtgtaaactatcttcgtaaagttcgcgctaaatcaggcggaactatttaccatgaaatcgcttcagctcaaactggtaagaatgatgaaatttcttggtggaccggaaatacacttactactaaattaatgggtcttcgtaatgatggcgcaatggtattacgtcgttcacttgctattggcacaattactgctgacgaaaatactaacaactatggctctcctactccaatgggagaaagatatattgctttgggcgatgctgcaactggtttaaaatatattaagcaaggcgtttatgatttagtaggtaattggaattctgttgcttctattactcctgatagtttccgtagtactcgtaaagcattatttggacgctcagaagaccaaggcggaacctggacaatgcctggaaccaacgccgcgcttttatcggttcaaacccaggctgatacaaacaatgcaggtgatggtcaaacccacattggatataattctggcggtaaattttcccattatttccgtggtacaggtcagatgaatatcaatacccaacaaggtatggaaattaacccgggtattttgaaattggtaaccggtgcaaataatgtgatgttttatgctgatggcggtattacatccactaagcagctttcaatatataatggtgtatatttagcagctaataattctactgccgggctaacattcgctccaactactacagttgatggcactaagcaaattttgtgggaaggtggtactcgtgctgggcagaataaaagctacgtaactgttaaagcatggggtaattcatttaacgcatccggcgatcgtactcgtgaaacagtttttgaagtagctgacgggcagggatattatttttattctcagcgcatagctccaaccggttcagaaactgtgggacctgttgtaacccagttcaatggacaagttaatgctagaggagcattatcaccgatggaagttcttagagttaatggattaagtgcattatccggacaagttactatggataacgggcttgttttatccggtggtggttctattaccggtcaagttaaaatcggtaataccgcagatgctttccgtatttacaatgctgaatatggagctattttccgtcgttctgaagcgtctttgcatattatacctacacttaaagatgcaggtgaaagtggtggtatttctaaccttcgcccattgagtgtttctcttaacaacggtatggttcaaatgcgccattctgttacgttaggtgatgatggtgctggcggtaatatggtgaccgttgataatgataataaacttgttgttataactagtcatagtcgcatttctcctaattaccgtatgcaattaggacaatcggcatatatcgacgctgaatgtactgatactgcacgacctgctggagccggttcttttgcttcacaaaataatgaaaacgttcgtgctccgttctatataggaatattgatagaacagatacaagcacttatgttcctattgtgaaacaaagatacgttcaaaataatagttgctattctattggtactttaattaatggtggtaactttagagttcattatcacgaaggtggtgacggcgtttctactggtgctgttataaaggatcttggatgggaatttaataaaaacggtgatttttattctcctggtaaattaggcgctggtaatgttcgtattggtactgatggtaatatcactggtggttctggtaattttgctaacttgaataccacaataaataaccttaagacggatattgtctcgagttacccaattggtgctccgattccttggcctactgatacacctcctgaaggctatgccataatggaaggtcaaacatttgatgctggcttgtatcctaagttagctgcagtgtatccttccggcactctgcctgatatgcgtggtcaaactatcaagggtaaaccatctgggctgtgctgctgtattaagtacagaagcagacggtgttaagtcacatagccatagtgcaagtgcatcaagcacggatttgggtactaagaccacatcaagctttgactatggtactaagacgacaagtagtttcgactatggtactaagaccagtaataatactggtgctcatacgcatagtttgagcggttccacaaacaccgccggtgcgcacagccacacaagcgctctttatgcgggaagtaacaacgctcctggtattggttctataagaggatccgccggtggtggtaatacgcttggaacttcttcttctggggcacattcgcactctatatctggtactgctgcaagcgcaggcgctcacgcacatactgtgggtattggtgctcatacgcatactgtgggtattggtgctcattctcatactgttgcaattggttcccatggacatacaataactgtaaatgccacaggaaatacagaaaacacagttaaaaacgtttgctttttaactatatcgttcgtttagcataaggagaagggacttctgtcccttttataatatgaaactctatcactattattttgacactaaagaattttacaaagaagaaaattataaaccattaaaaggcgtaggatttccggctcattcaacaccaaaaaaacctttagaccctaaagaaggctatgctgttatatttgacgaacgcgagcaagaatgggtatatgttgaagatcatcgtggaaaaacagtatggacttatgataagcaaaaattgttattgacactccaggtgctcttcaaaatgttactacagaagaacctggtgaatttgacatttggaccgacgacgggtggaaggaagatgaagcatataaacgcgtagttcaacgtgataagaaaattcatgaactctataaattattcagtgttttaagttctcttattgacgcagaggttgctaatagagaagaaaaacgaaaatttaaagagctcaaaacattttctttgcccttttagaaaaacacgaacatcttggcggtgaattccctaaattccctgaccttgaaaacaaatctattgtcaaagcgattataaatatctttaagtaaggaggtattatggcaacaccaaaagtatcattttcgtttagtgatattctatttgggttgctagatcgtattttcaaagataacgctactggaaaggttttaatgtcccgagtagcggtaattattctttgttcctaatggcactaatatggtacaaaggaagtattttgctggattattatgtaagagctaagtatgatacttatactgaaataatccaaaagaacgagctttacgttttgaatctgcggctctagaacaactgcaaatagttcatatctcatctggtgcagattttagtgctgtgtattctttcagacctaaaaacttaaattatttcgtcgaccttatagcttatgaaggcaaactacctagcacaatttctgaaaaagtcccttggcggattcccggtggataaaacggccaatgaatatataattcatttaagtggccgtcatttctcatctaaatcagaatttgcatttttgcctacaaaatctaagactgccgaactttcttatatgtatagttgtccatactttaatttggataacatctacgctggaactgtgacgatgtattggtataaggggagtaatatacttgaggaagaccgcttagcggctatatgcaaccaagcggtccgaatactaggaagggctaaataattagttgttagaatacatcgctaaatgacgataaatattttcaaaaccttcattgaattcactaatcagtgttttcttttcttcggcagttaaatttgtaattagttttctgaacgaattctgatttagctgccgaccatctttttaattccaatctcattcaagaatccgatgaaacttgctcggtcttcaacaatatcttccctagagaatttaatcaaaataatagaagcaatagtaataatttcacgtacgatttcaatgtctttattcataacgttttattcattccacttagttgatatggatatagtaccaatatcagtgttgattgtaaacggctttttctacgcttttaacgtaattggtatagtcttcttgttcgtacgagtgtaaggccaagaacggaactaatagttcattatagactaaagcctcacgctcacgttcggcctctactacgttctgaagattatgactcatatcgttccttataactatcaatgtagtcctgtatgtcgaagaatgacatttcatattctagggcattaagagcccgttcttcagtatagtcagaaccaaagacgatagtgatttcaccaggcttcatgtgattgaaatcaacactaaaaggaatacgagaacatacttcgtctgccatatctgcaacaacactacgatatacttctcggttaacctgataaagctctgcaagttcttcacaaacgaataacaagttcagtggcaggattttctttgattttagtaagcatagtctttacccttatgtttttgtttgcgtttagattgaagttctgatttcttcttgtccttatgaacagaagccttattgaaatcgtgttttgctacaagattgttcataatgatttataacctcatttaaacatttatcggtaaaagaaaactttttagccacagaacattcgataatgtgctctttcaaatctttagagttggtatatcccatctcagtaataaagtggcgaattaaagctttattcttatcattaacagaattaaaataatctactttagaatcaattattctcatcatctaatttccttaattgatattgcaacgagctaataatttcttcgttcattttaatatacatgtcacgcaagaaagattttaacccgtcacgaataattgctaacgtatcacctttacataaattaaccaaataaggatggtctaaagcgtccccaaccaggctgattagcatacataccatagttttcttccatcatatgattaagacgtttgatatcttggatacgtgattcaatagcatctttctggagttgtttaatattcattaataaaggtcctctgaataaagttctttctcacttccgccacgttcaatacgtacctgtccagcatatgttgcaataatcattgcttcttcacgagtccagtaattagagtattggtcgataaagccttggtcgtcaccacaaacttgttgcgagactaattgaggaccaactatatcaagtacttcagccatatctttagagtaatgacgaactccaggaataaccagagttccaccactcttcaatttaaacctattagctgcacatactataacacgttgaactttttggtcattattccaatagcacgtttgccaacagatttcaggaacttcattcattatgtcatcagcagaataattataaccgtaggactggaatttttctctgctagactttcaggagtctcacgagacaaggccaaatctaatagctctaaacgttctttaaatgatttcatttaaaccattccttaatacgttgccaaatagatttttgtgcttgtttatttacaccaatcgaacgaataacaggttgtgactgctgatattctttataatcttctttatagacttcgtaagcggcatcaacaaatgaactgatcgctgccataaagtttttacgtataccgccaggagctactccattagggaattcagaattttcgcgaataattaaatataacccagctttaactttaactatagttccaagataagccccatggtaccaaatatcccatccttcctgagtaggttctgcacatttacgaagttcgttaataatattcagcttattcattatgtattcctcacagtacgttagttacaagggtaatgatttctttggacacattagggaagtcaatgtaagtatatttaccaccaatcttaatcttaacatcattttcaagagaagtaaacagctttgattcagtttctgacatgttgtatgcaaatattctaagacaaccatctcgacgaatttcgatctgacgaatacctagaactcgttttgcaaatcgaacttccaagttactacggttttcaccgatttctttaacttcaactttatctttaatattttcaaaaacaaagtttgctaattcatgcatttcaggagtaactccacgtgcttttctagtgttacgtttctgaagaagttctggagcattttcttgggcaaagaggtctgcagctttttggataatatccattgcttcgcctgttgctataagtccatcaccagatttttcgactaaacctttcttaatcaatacaccaatgttagagttaacaaccgatgcattgtattccgcttccagagcttcacggacattggcagcagtggtgaagttgttcttaatgatataaaccattattgcaagcagttttttcattcagagcgttttcggaagctttgatgatgtaagtaactttagacattttatttctccaaattagtatttgttttgataggtctataatatcatgtttgaagcaaaagtaaactttattttgggctctttttcaaaagccctggtaaaatttacaaactcatttctttaataaggccaataagttttgcctttttagaacgaagcttttctaaatgatatccgtttgaaccgcgaacaactaaagaattgatttcaacttctaagaaatttaattcttcaacaagtgctttacggggagcattcataccaggtttaactttaccgaaacgagtagttgtgttttgggttaatttcattttagacattttatttctccaatttggttgttttgtttttgataggtctataatatcacgtttgaagcacgtgtaaactgttttgtgagaaaaatgcacaaaagggagccgaagctccctaatcgcgattggtccaaccaatacagccaaatcactagtgcagctattgcaccgagaaatcctaaggctagggcactcaaagtgcctccaagtctttagtgtactctgtcacaacatcagtagacttcaatactcattttcttctttcttagctttagcttcttctgctagtttacgtgcttcatcggaagtgatatggaagatgttaagacctaccagtttatcaacatgttctttatacatttcgatttgtgctagctcttcagtcaaagctttacgagtcttgccctgaatcacaatttcaccactgataacttttttgatgaagtgtgccttagcaaaagccagtttaaatgctttttcagattcaaggattttgttgtcaatacgtttctgaacgtaagtcttacggacttcaacaaaatctttgattaagtccactacgttatcgtagaccgctaatttacctttttcattaatcactgtgatgttttgtgaacgacgttcgatgagactaaaatctttcatgattttttcatgacgtagctcttcgtcatctggaagcgagtactctttacggaacttcaccttaaacccaaagccgtgttcaccacaatcatcttcccatgagattagacctttgtcttccaacgggtcaagaaccttactcacatacgtttcacggtcgaatttatatggtatttcagttatctgcatttgagtacgagatgtgaacttgtatgttccgtgaatctcataacgcccatcaacttcatgcacttcaccacggaattccgggaattcaacttttggcttagtgacatttttaccttgaagagcttgtaatacagccttttgaccgatttaaaactatgaggcagaatatttgttgcgtaaccggttgcaataccagagacaccgttcaaaagaactgtcggaataataggaagatagaattttggtggaacgtgttctttatcttcatgagctggagcatattcagtatcttttatagacattatagaaatttttacttacacgagcaaaaatataacgagatgctgcagcttttggactgttctagaaccaaagttgccttgaccatctaacagtggatagttgttgttccatgtgttagccattaatgcacctgcatcttgtgcagaagattcaccatggtgataacctaaatctgcaacaccacccgcaattgatgcaagtttatgaaatttttctttattaccacgagccaaatctaatgcacgatgaaccacaaaacgttgaaccggcttaaatccatcaatcatatttgggattgcacggttttcaacggtgtacatcgcatatgctaaggcttcgttatcaataatactttttagattacgagaattcaattgcatattttcaccatattaatgaacgaataaccattataacatctgaaatgaaaagcactacttgaattagtccaaacatcacaccgtagtacagaaccgtaagcaacaacaagaagcccgaaggctcctgctaagattttcttaatcattactcgccttttaacacgttaaaagagctaagaccgctaaggtgccttgtgatacggcctgttgaaataccgttgtttcgcctgtaactaaagtgttaacgaataaaaacgaccaacacaacaatgcaataatccatgataccattttaattacctcaaaaataaattaaaggcctaacttaataggcctgtataaattagtaactctgcagaatgaatttgaaattatcggccagaagacggttcgtttcagtgagtgtttgatattctgatgtatggttgcgagtgaatgctagagccaattgtcctttaccataaccagtagtcaggggtttcatgttcttggctgaaacaaagattacgtcatattcaatattattagtgcccatggtacgagccagttgtgaacggccttgacgaatgtgagaaagaattgcatccaacccttgtttagaacgttgacgtcctacaaagaatcgtgctgctacttgacgccagtcagatgaacctttaacaaagaagtaaaaaccttcacgagaacgaaactctttagaaacttcagaaccatattcgccattacgaactactgcaacaacttcaccgccaactgccagaaggtctttacgagttaaatatttggacatgctaatttcctcaattgattaatgtttttgtaatccatgagagcattatactctgctctcaagagtttgtacaattttattcggctatatcagaacgttcaaaaagctcttcaacagttaaacattcagtgtcatcttcaataaagaatcgagtccaacacgttggggcgatacagttatgagtttgtccggcgatagaagctacacgaataagctgctgaccattattcagaacaaatttttcaccaatttcaacatctttaaaaagcttagccattttgtattcctcatgttttgataggactactataccataatcctatactgtgatgtaaacaattaaattacgttaaaatatgttaaagccaaccatgttccagtgaacgaacatgcaatgtaaaaaccagtatcacaaattgttcttagtacaataagaagtgcatttttcataagtacctcaatgcaattgaaaatattatacaaatcatagggatactaagcaaccatattccgatccacattttagaactcatatctcaacttccgcgagttccatatatcctttgttgataacctctttaaggtctttagaaagaataacactaaaatggtcgttcatatgtccattaaccagacgagttatttcggcttcagatgacatataaggcacgtccgagtcccaatgagatagacctaaatgagtataaatcatcccttcgtcatctgcggtgttgtacattgaaacaaactcacctgtcactttatgttttgcgtagaaaaatttaaatttcatgatgttatcctcttttagataggactactatatcatagtcctacttagttgtaaacacttttgtgaaattaaagatgaagataccatccgttgtagttgctcttgcggacgattttctttaggtcttcatggtctcccacgaactttatagaataagagaagacgtcaggtgaggtttctttgacattcaatataataatacagtctgcaactcgatgattcaggaagggccctatgttgattccgttgccacccggataatcaccgctgtatcctgtggtaacagaaatccatttagaatccatctgatgtgtcttgacttctacgcgtagaccacagtacttaggatgagctaacacgtcccatgcatacgtgtacgggtcttctacatcttcaatacctttattaacatatccgtctagccaatttgctactacatactctgcaaagactgcaaccttacaacgtcgaactacgtcttcttttatttgacctggatcttgtttcaacgagtaccgagcagtatcagcgatcttcactttcatttcactagtcaaaaactcattcgacaggataaatgtcggaagattcttcagtctcaacagtcccaagttcgtctttaccatagatacctctgatgtgtagttcgccaaaataaatgcggtctccttcttcaagatattctgcatctaccggtgggatttcaataacaacttcgtcgcattctaaccagccgtagtgtgcatcaccaggatgttttaccaatttagcacaataaactgatttacacttatgatgaccacgaagattagcaattttggattctgatacgtcaaatggatgaatcataattacccctaaagaaaaaaggggaccgaagtccccaattattattctgcaaataattcagtaacgtctgaaattacttcataacgacatgtacgcatcttagcatcaccatagtcaaccgggatggatacaacatcacgtggatgaactttaactttcacaactttatctgagcttgaaccaaagtggcgaatataagatttagcacaaacgtggagaccgcgagaacaggtttgagtatcatcgtcgttaactcgagtacgaggcattgaaacaactttacctggtgagttatcaaatgtaccgctataacaatctaaatagtctttacgaactactttccacgcatagaaatacccatcttcagtgatttcaatatcatttgcaaccaagaagtcgaataaacgttgtacagctttttcgctcgggttttctaacaggttttcaaggaacggcagatagaatttaaagtcttcgcctttttccatggaatcaataatacgattaaccagtcctgaacgaatttctataccttgataaaataaactaccaccttcaatagtaacattaccatcaacaaacttactaatagctttcttgatgttaataagttcgacagctttactaaggtttcctgcgaccagattagctttaatttcttcaaaatttgcatgacttgatggggtcgcattgtatgctacgcgtccttcaataattgaaataaatttagatgacgcgttccatatgatttcaggacgatgtccgccgataataggttcatcattttctggaacttcttcgattacataagaggcatcgtttgattcagggacaacgccttctgctttaaaattcttaacaatcttacgaagagtatctgttgaaatgtcgaagtaatcggcaatttctttacgagtccatttgcctgattcaaccaggccgtaagcttctaactgttcttcttgggacaagcatttgatattgtacataatgtttccttatttggccgcttccacggccttcatgaatttaacgatttgagcgacctgttctttagaaagagtaccacgtcgtcccatgtattctgacacaatatgataattggtttcgaattcaataaccattttatcatcattatcgtaagcattatctttaagcttatcgaaaattttagcacacaattctaacttcctgttcaggtctctgttttcagcacctgcgaatcgattccatccccaacgattatttactgttgagagttttgcaaagtctttactgatttctttgttcttagagctaaaatatttactaaggaaattaagctcttcattacgagtaatatgattcaaataaggctgtgctctacgacttggtgatacatactcatcataatccactttatcgattagcgtaatatagtcattaattgatttttcgaacaagcattctacttcaccaagtttacgaactttcttagcaatctgcggacgaactacagtgaactctttaatacctgacaaatcagcaatacgggtcaagaaattggagtcatagttcaaccaacctttatctgcgtcaagacattcagcattagaacgattacgaactatagcataaccttggatttcatctgcttcactcgctggaataaagagatcttctgatacccaaacatcgttttcattcattcttaaagaatcgatgagcacttggcgatttaggacgaggctcattagttcgtttcctgacttcaatccatggcttaacgatttgtaaaagctctgaagtcttgtacatgttaatgttgtcgccatcaaagataactttaaggcgttccagaagtttcattgcatcttcgtctgtagggtcaacgaatagtacgcttttaccaaaaccgcgtggaactttaccagttaatttaacctcgtctttagacatttcaattgaattaagagctcgcattaatggaacgcgtcccttaacgtcgtcaataacaatttcaacatttttaatgttaatgccaatcagactgttaattgaaatggttgccgttgagctaccgctttcacgaatacgacgaagacgaggggattcaacgatatcgtatacgacaccaagattacaccactcaggccccattttaaaacgtttatacaactcagaataagttagttgttctttagaggtatttcagtgattcaatattagacccggccttttccatgtatttacgagcggtatagccaagagaatcaatttcacggaacacatgacgtgggtatttacaatcaatccatttcttagaatcttcagcgaacaatttagcatcgatttctgcaacgcgtttatggatatttgctactgtacgtttatcaaatgacaatgcttcacgagacggagctacatctagttcacccatagggaatttaatataagctgtagtgcatcgtgtcatcatccatgtttgttctttaataacacttccgattggatatacaataccaccgtaaacagccatgatattaccgcgttcaccccatggagcttccttggccaaatatacatcgtcaaattctgggaagtatttaatatctttaacaccacgaacttctgcaatatcacctagaggacgcataacataggcaatttcggatgcgaacttttcaaaatcttctgggttaacgggtacaacaactacttctacacctgtacggtcgtcaggacccatcttatctacaaaagtcggcttaatttgtggacctgtgtcatcttggtagattacgtaaccacgaacttcaccgttgtgataagacgtaaggttaaacgtatcggtatatgctagcggagctttagaaccgagtccgaatccaccaatgaaatcgttactagatgttttagttgaagcaaaatatgagttatagattcctggctcttcgtcattacctctaatggtgaaatcgctcataccaggaccaaagtctcgaactacaaagcgtgggtctaaacgacctggagcctgaacaataaacttatcagtgcaaccgttaagaatttgtccatcaatacagtttgtgattaattcacgtacacaagccaattctttgtttgtataaaggtcattagacaaaatcttataaactttgctattgccttgaatagtgaatgctgtgctcttaccgcctgaaccaataatcgtttctttagccgtttcaataatcatatttttctctcatcacaagttacgtttaaaaatttctgctacttcaagaagttcttctttagtagctgtatcggtttgtattttatatcgaatttctttaaagcgttctttaaaggactctgctgattcgatatcaaaaatctttggataagccggaattcccggagcactgctttatcaaaagttccaagtccacgttatacgttctcataatattctcttcagtagattcctagggcactattactaaagaccatataatctatcatcttatgtgtaatagtgcctcaggcgattcaggatttacgctgtgaagattttatcccacatcgcaacaactgcatctcggttatacttcttccatactgcttcagcacgtttaactcgagcttcgtatgtgtcagtgaattctaatacagcttttgtgtaaagcgcaactacttctttcttaggagtagaagaatcaattttctacacgcacagtatctgggtcgtattcgaatgtcgcatgcggataatccttaaaaactaactggattacagggacacctttagaaatggcttcaatagaactattctctaccgtacccgtgtcaggacacgtattgataagtgctttagctgttttaagacgttccatgatttcactgtgtggagcatcaataataacaggatatttagctggtggtgcccatttgcttggacaataaccaataccattttcgcctagtgctttaattgcttcaagagcaacatcagtgcgacgcatcttagtgtcataacgttgagcactaataatcaaatcagttgccggaagaacttcaggtttttcattcaaacaaataaccgggtagtcatcaggttcaaataatggattttcacgccagtagtcataatcaattttgtcagtaagagctgaagtcatatgacaatatttacgttcaaattcacggaatgctttagtaggagcatagctcttcccaccgttcttgtgaatctggatagtctgatcccaaatttgaacaataccacgagacaccggttcaaacggcgtagccataaaattcttatgaactttagagagtccagcatctttaattgcttggacggttagtttagtcggttccatagtaacaacaaaatcgtattcatggatgccggctagttcaacgatcttacgagccatagtataactcatacctagactgaatttagtcagatgaccaacaggatggtgtgtaaccttccaatcaccaaatgtgtcattatcaaaaccaatataatcaatatcagcaccgatggacacaagatatttcaacacatttaaatgtactgcttcaagaccaccttgtacacgttctgggttaaacgggactgcgcgagatgggataaacataactttcataattaagccttattaaaattaaaatgaagctcccgaaggagcttaggacatccattctttacgaagttctgaatcatcacccaacaacatttcaaagagttctttccaattttcaggaagtttaactacgtcgtacacagggttttgaatcatttcacgatattctgacttttcaagggagcccaatcccttgatgtatcgaatactatgcttaggcagtgtatctttagcttcttcatactcagctacagtataaaaccatttttgtgttttgccaatttgtgcaataattacaggcgttttaacaaaacgaatacgtccttgttcaaacaattcaggccaattactaaagaaagcaagcaaagccggatagatacttccaagaccgtcatgatcggcatcggtcataattgcaatattacgatagttcgtattctctgccttttcaccaagaataagacccgtgatagcacagatatcaaagagctctttgttcttcatcatatcagcatatgacataccccagctattcatcaccttaccacgtaatgggaatccaccatgtagttcacggtcacgaacatcaatgagataaccaattgccgaatcaccttctgttaagaacaatgtcgtatctgcatctttaccacattggttagctttaatatgcttatgaaccttagctttagttgcctttttagctgctttagtttctgcagccttttctgccgccaatttacgagctaatgctgcttcaacaataggcataatcaaggcttcgtttttaagaagtgcctgagcaattttcttagcatctaattggatatgattacgaatatcaccatacgttgacgttaaacgttctttagtctgagaatcaaaacgcatattgctcatgtctctaataaacatcaacattgtgagacattctttaacacgagctttagtgacttcaatacccttatatttctttttaatacctggcaaaagatgttcgcagatatcatccattacgcattcaacatgatgaccaccgtttttagtatggatgttattcacataaggttaaatgacggaagccatctggtgatgttgtgaatgctatagagactttatcattttcttgaatgatgttatcttcaccaaattgtttagcaaatcgtttaaaattaccatcaacctttttaccgttaaatgtgaacttgatatcaggataaacgactgccaatgtttgaagtcggtctaaagtaatatctaaataaatttgagataaattatgctcttcaaatgaagtgaaatcaggagtgaagattactttagtgcctttacctttagatttcttagaagaccatgatttgttttccattccgtttgaacagttaacagtgatttcattttcaccatctgacgtaatgcctgtaaacaacgtagagaagatattagttaaactactcccgacgccgttcataccaccagtcttgcgttcagagtcgtcaccaaagttaccaccagcctttggaatagtccaggctgctacaggcccaggaatttgttcgcctgtttggtcgggtaactaaaccttgaggaataccacgtccgttatcttccacagaaacttgattatttttaatttgcacatcaattttatttgcaaacttaaatgatgtacgaatagcttcatcaaccgagttgtcaataatctcatcgattaatttaaccagaccaggaacatattcaacttgttgatatttaccaaacaaaaaacgctcatgtgcttctttggccgaagaaccaatatacataccactacgtttcttaatatgttctacatccgacaataccttaatttcatttttaatcatgttgtctcctcgttatgaaggtattctatcatccgaaatctaaagcaaaaagggccggagcccttatttaaatttaattttctgaagtgtatcaattgcagctaaacgcccttgttcacttttaaccgtaatgaccacatcgcctgatacgatcaccgaaccatcaacaaattctatagagccttttttgaaatcgacagctgtaatctggttccggaacttcttcaaagaatttaaattctgcaccataaatcagaatatcaccttgcatactatgaatagttcggccataatcgcctacggcttctacagcaatcactgaaacaccataaccaatcatctcttccacaataaaatctttagacaataaagtagtatgcagattagtattaagacgtttaccagtcgtattaagaattctcaagaaattatcttcctgtcctttgataatacgatatttcttaccaacttcaaaacctttaaaacctttaaaagacgtattaaaagccataattaacccttcttaagtaagtcgtaaaaaccaccgttcacatgtttaggagcagaaacccgacgagtagacagacgatgacattcagggcaaacatcgttttctcgttcagaaatccttttaattttttcatattcatgaccacaatcttcagattgacatttatagtcgtataacggcattattgttccttaaagtgagctttcaacatttgatacaaagaccatgcctggtcgttatttttgatagtaatcgtcatcgcaggaaattcagacaattcgccaagttcatcagaatcttgctcttcggacgcttgatacggatttccaacttcgtcaaagaactctgcttcattcgtggagagccagataaagttttcatcaagaatatcaccgcctgttgcgtatccaaccatgccagtagatgtcacaattttagtaggacgtccaagatggtcaacatctaatactttaaatggttccatgccaagacgtcgtgcataaatcccattatcagtgtggtctttaataaactcttcttgggcacgtttatctttaaattggtaccatgagttaacgcggaatttattagccattagtaagtttccttccaataagttgtaccgttttcagtgatttcacggaagataccatagataggcatttcatcgccgagtttttcgtaaacgtaaaccaacttcggtgtagtataaaattcggtccagtttttctgtacaacaactaaatcaggattaaacagaacatcttcaaattcatcgatatttgaatcagtagttacgtttttaatgatttgacgtttcataatattctcctcttgttttgataggtctatagtatcatagaccatagttgttgtacatcattttagcaaaataaaatcaacttgttctgccaatgaacgtctaaacattaattgacaacttccgaggatgaaatcaggtgcttcataaacagcgatgtagtatcctttagctttcaagagttcaacatccacctggtcatcaaaccatgcataaaccgcgtcaacactttcaaatccaaaatagaacccttgagcccaatcttcgttcaattcaaatgtgtgctcaattctatagtatcttaagatattttgttcaaggagtttatcttcatttactgtaggacgattagggacattatagttgtcgccgtgatggtagaagttacctgagagtattccatgcttatcaaggaactcccatgtttcttcagagttgtcggtgcccgaccaaccgtacggcgaacgaggttctttattccaggaggtttcccaaattctgacggctttaccgtcttcgatagcaactcctggtaaagattcacgttgagtgcaaaaactacgttctacgcggtaaactaacatattattctcctctagtcgatagatttatagtatcaaaactagaggagaagtaaacaactttatgcaaaagatgctggacaatattttttgatttggaactcaggaactaccatgaactgtccagcgaaaacgatgttataaagcttaacaccatcttctacccattggtcgctaataaatccggcgatttgcttagttttccatggcgttccatcagttgcagaagcaatagtaaattcatggtcttttacaactaaaacagacctgcacagtttccatttgaacgctttatttcttctggttcaatgaattggcttttaacgtaaccaatgttgccatcggcgtcacgaactttaacttcgttacgtccaaaaaccggatcacttacataaagaacttcaaccaacttcccagcaactttagagcgagaagcatctgatacgtgtacataatcaccaatagagagatttgcaatattcataataattccttaagctttaagaggagatacatagcgagtgatttcagattctttaacaactcggaagtcacctaagaatacgatattgtataacttttcaccatcttcaacccattggtcactaatgaagccgcacatagtatcagttttgcttggataaccgtattcgtcgatgtaatcaaattctttatcggttataaattcaacgcctttgcaaagggtccatttgaactgtgtagtaggctcaacgatatcgtttgaagcaaagtgtgcaggtgcaacttcttcgcttgaagcaaattggactcgtatatgtttttccaggaatttaggacttacgtaagcatactgggcatcttgtccgccaaaactcggaatgattcgaactttaacttctttaacacgtcccatgccgttagtacgaagccctgctacttcaaccagacgacctgcagctttagaacgagaagcaggagatacacgaaggatttcaccaatagtaatcataatttctctctctttgtttaaattgaattcactatactccatccatccttggatgtacaacattaattaaggatattaaccacagcactacgtggaactacactaaaatcacctgcatgaacaacgttcagaagttcaacgccgtcttcaatccattggtcagttacccatccactcactggtcctgcgaacggacgtcgaattgaaacagctttacacaacaaatcagtaggctcaataggcttaatcagagtaccgtacatacaagcgatatccatatcaaagtggagaccatctttaacaggtgtgcttcttcaatcaacagttcaaagtctgtgcttggaagggcggtagtagaaattgtaccgtatgaatttttaatttctaagaataaccaagggccttcagcttgtttgatgaagttaacaatagtgaaactattaccttgagtggcgcctaaaatttcacaaaacttttcataagctcgcactgaagcaccataccagttgatttgtttttcatctttcaggatgtaagtagccgtagtattgatattcataatgtttttcctgtttagttaagataaaagattatactacaaccatccttggttgtaaactggttttatcgctgttttacacttaacgggtcaggattctcagggacatcttcaaggccaagcgcataacgctgagcatattttaacatcaaaatatctttagcacaatcgtgaatactatcatgggcaacgaatccttttagtgtacccataggtaatggacacatacttaatcctcgtgtcaacgagtaagcttcgattgccgtacgaatatcgcgttgagcccagaatttaaccggttctaatttatcagtatcaatctctggttcaagaacaccttcatcacgatagaggtcacgaatcaaatcgaccaatattgggaagtcaaagctcataccacggcaccacatctgtgatttccattggtcaactttattagctcggcaataatctaaaaagattttaatgccttcaagcgtagtgacatcgtcttcagacggagccaggtttttacgcgcttcagccgattgttctttccaccatttcatagtggatttagcgaaaactcgcttccctttctgagaagctaaattaaatttaattcgcttacctcgttgaacaagttcttcaaatgattcaacaacttcagggtcggaattatatgcaataaccgcaaggtcaataacagccgcttttgatgtattgccgaatgtttcaaaatctataataacatcagtgctcataattttctctcaaataaaatggacgtcaaaccgaccacgagttgtgccaacatatagtaattgtttggctaattctgaatcggcataatggatacacggtgtataaacaaaggccgtgtcaacagacataccctgagccttatggaaggttgataccggtagtgccttcaccttagtgaacatacgtttagcatcccagaattcactccatggagctttaccacctttattccagaatttgtatgtttctgcagtcttagccaaaaacaaattgaatttataaagctcttcttcagaagaaataacctttatatcttcgcggacgtattcttcatcatcgccatatgtttctactgtaagattccagtatcgtatcatatattcgcctgaaacaccacgtgctttaacaaatgtagacgtttctacggcatctcgaatacgaacgaattgcccgttattgaaaagcatttcagtcatatttttgccatctagcttgtatgtcttagtaaacggctcttgtagaacaatgacttcatctttaataaacggcttttctgtttcgagaagttttcggcgaataattgaattcaacttgtccacagacttatttgtgaatgccatcattcgattttcgaaaaggtcttcaggagttttaacgacattaaaatagttcatcatatacgatttaaggtctgtatatccatgaacaccatgcccgtcaactactttatcataaatccatttgccattacgaatatcggtcgcaacatcaataattggtgcattgctacgtttaacttctgtaaggttgcattgcacgaagtctttgtgagtgaagaaaggacttagatacgcagttgattcgcctgggtcgaccggacgaatctggcatctgtcgccgattccaattactgtgcaccatttagggatactagctaacattattttaaacagagaacggtcgcacattgatgcttcatcaaataacagtacacgacacaaggctaagtcgggaacctttttctgttcaaacaatacgttttcttcgtatgtagttgggttgattttaagaatgctatgaatagtcgatgcttcttgacctgcaagtttgcttagaaccttttagcagcatgtgtaggggctgctaaaataatacctgattctccagaagaaataagggcttcaacgatgaatctagtaagggttgttttacctgtaccggcaggcccattaatagttacgtgatgtttcttttctttaatagctttcataacaacgttgaaggcgtttttctggccttcggtcaaatcatcaaatgtcatcgtaaagtccctgcaattggaatactaacaatacggcctgtgtccaggattcgttgatataatctttgcgtctccgcatctagtttaacgtgtttcatttcaagcttattaaaccagaacttacgcggagtttcgaccattcttagaactcccatttttaaatctgttttatactgtgtttttcaaagtatcgaaaactttatctgcaatatcctttctaaaaaatactgcaggacgatgttcatcaagtggaactggaacagtaaatccttccatatctcgataaactattgcatatacataaaccataattaacctttaatcagttggaataatgatgcgctaagtggtaagccacgtttcaattttaatttaccaatgaaaccaatcttttcaaaacgttgcagaccttgaataactttatcatatgtatcgaaaagcgattcagcgtcagttaatttagttttagttttccagtcagagcctttaagaagaacgttgagtttagtaagttcatgtccttccgcttgatgtgaaccattaatgcgtgctttcaaagcaacaattctaagtttagattcgttggataaaggttgatttttcatcatgttcgccatatgcttaacacgattttcacgttttgctcggatttttaaaatagtaccataaaccttttgatttgggggcccatttcttctcatcaagattaagtttctctactttacgggcagaaggattagcgatacgccttgcaatggcatcacgtttctcaataagttcttctaatgttaaatcagaacgagcagtgttatatttttcttaactgggataacattacctttaatgtagccgatatcgttattaaaacgttctaaggataatttctcaccttcaacagcgttattgaaagattcacctgagtaagcgcagaccttttgatcaagaatgtttttaaggtaattaaagtctaagttaaaatccttagagcgtctcttcgcagaagctctggtgtggtcaagacgacgattgattttgttaattttattatttgataacataatattttcctctgtcttacggacgttaggtcatttagctgataagcttataatatcatgccctcagatagtgtacactctttttcataaaatgctttaattttttatgtgttataatggttctaggagttccatccggttattccaatccagtcagtaaccgacaatagacagattccagattgtataacgtccatcttgaataatagaatctacacgcagtgtagtccctatagggagcataaattcacattcgtcagatataagtctagcattagaccgtcttgtcgcttcaggaaagctccattgaactcacaagatggcgcagccagaatcatattaagcatatgttcacggaagttgaaagcgaatggtgcatctttgacgcagaacatattaaatgttccgtaaaaattatacgaagcaaagttacgtgctacaccgaacactgggctgaagctcattactctatcaaatttaataatactaccaacatctttatcatcgagtgtggccatagttttcttagagattccacgatacattgtctcaggaacagaagacgtccaatttctacgaacgattgaacttaactcctgttgaatacagtctggcttgttttccatacactgccacagtacactttgttcaatgtcgctgaattgactatcaatttcgtactgcaatacatcttgatattcggggttttgagcacggcgaaccatttcctcaatttcacattcattatacggcataaacatttaggtttctcctgtggttgataaaggtatagtatcatcgtcggtagagtttgtacactaaaaattcaacatttttaaatgaatgattttgtataatcgagataaagggtcatattctaagtcttcaatttccacaatctcaaatctagagatacccgagaccatgtactcttgttcagattcaatcatatctaagacgtcaacacgtgtttcttccataacgtgcttaggggtctttccagcgagtacaatgttaaccatgttttggtagtaatcaaaaatgaatggagcattcctgagactaagaatagtgtacgtctgatattcccatctcccagagaattgacgagctgtactgaaatcagtgttgtgaacgatgttactcgtccaggagaccaatggcatccaacagaaagaagggaaagacgttctacttcttctggagttacaccacggtagagttctactggtactgtagaagtcatatgcttacgaacaagatggtctaattcatagtggaaatccgggtcttccttagaatcggtgcaagcccagagaatgttttgttcttggcgggtgaatttgctatcaatcagatttgttaggtattcgcgttcttgaagttcagattgacatgtcatgatagacctccatttaaagataagcctatcataacacgagaggagggaatgtaaactactttttaagctttcctactaaaggtccatcaggaccaggttgttctaacatgaataacgatgctttaaaaagcaatgtcaaccctttcaccattcgataccatatctcaaagtctttttccttgatttctagtaagaatttctctttaaatttctctttcatttccaaggactccatggtggtgggtcgtcataataagaggcaaggtctttcagggcttcgacaggtaaactaaagccgtgtcgttgtataatactatctagttcatcaacaagttcactacgatgcactttaggagcctcaacttcaggctcgtcaaacatactcataaggtccatattattcaccgagataaaaactagccggttcagaaaatgtttctagtgctacaccttttgtcttaaaaaatttccaaatagctcgttgcaaatggattaaatctgctaatgatgtaataaagtatttttggcaaaatacttatggtcccgcttttcaaacaggtctaaacgcttttcaggattcacataaacggcattttccgtagattcgtaccctaaatcctttatgccttcttcaagactaaacggagaatttttagaacgagtaatagctccaactcgctctacacgaattttgtaacctttaggaatctgcaatttgcagaattcttctacgatatattgcggattatttagacttttgttaatgagaatagctatttctagtggagtcttatcttctactggtatatgtttaaacgacttggcttcaagcaaatacattttaaataacatagcatccattataatttcctcaatggttcacccatataaagttttacaatacgttcgccttcaagttcgacgagcttttcttcatgtttctggaattctttagccatattctcttcaagaacatccagccaatcttctggaccgacaccatcgtcccagcttttaaaccatttaactatcttgttcattcgcagctccctgagcttgaaccacaatcagaataacttgacccggaatcaccaggccaagacgatacgtatgaatgattataacttgaagagcttgaagcattaacctgttttgtttttggacgaacaacttcttccatcattccatcaccaatgtattcccaacttttttcgtgtgtatcagggaataggcatcataccttcgcctggtttaacagcaaataacttcttcagtatcgtaagcattaattgttcctcgaacaaaacgaacgccaccgtcatcccagcggatttcggcattaaatttgacgtcttcaccatccatcatgaatgagtgtacgactacatcatcataatatccaagaccgtatttcaacgaaacttcttgagcaatcaaagcacctaatgtgttattaggtttaatccaacgatttaacatattgttctcctcttgagtaagtaagaatatcttaacacagtttttagtggatgtaaactatagaaacgaaaaaggaatcccgaaggattccttaaattatttaaccacttactggtgtaggggtaaacattgcagcgttcttagtacgccaatctgctgcgtcagtcaccacagtagtgtaagcagctttttcagacgggaaagtctgataatgagaatctgcaatccgatgttcgtttgaataaatctcaaacggtacagaaacttccatacctttaacttctttgccttcaccagcaggatgcgtaaaggttttgatgtttacataaccacccataattaactcctttgttgtttaattacaggtgtatttataacttaattagtaaccattatcctgacgttcaaagttgtgttgatttttcaagtagtaaagtttaaagatttcttctgctgtaagaccaagaccttggaacatgttcagaacgaaatgcagaatatcaatcatttcaaacttaatttcaagctggtcttcaggagacagttcatcgatacgacgatttcgatattcagcatgttgtgctttccatggcttccatacactgctggcggctttttcaccattgctcataccaccaagtgaagtcagcagttcacggaattcatcatcaatataatctttctgattacgcagccaatcaacaacatcaccagcagtagccaattcatcaggatgtttgttatgttcaggcttgtcatttgccagacgaacctgtaaagatttctgcatatcaagcattacctgaagtgggtctttatcttcgtgaatcagagcattaaaataagcttcttctgctttatcaacaccagaaataagttgtgaacattcgttaaagtgtgccattatttttcctttcaattcagtataagagagttaattctaacattaattttataaagcgtaataaataataggtaactaaggagatattatgtttaaacttacatcgttaatcaacgctattaaaggcaataaaagaaaactgctatcgccgcaatagttgtaggtggcattatttcatggaacttcgggattgcaccattgttagttgcccatggtattatagttccttctgttccattggatactgtagttgatttggcctttgctattataggacttgtttaaatcttcgaataacgagataatctcattttagcatgcaacccacttgaaatattctgttttcatatattctaaaatttcttgtggtgttgcattttctttcattaccatatcattcacatcctttgatctccatggagctcggtcccagaacataacacgttcgcctgcatcaactaatcgcttcatgcgagctatagtatccggatgcctaggttcattatccattacccatacccgacgttctttaaatggtaccacatctaaatctattgagccgcctgtgatagcgattgcattgggtatgaataaactatcaatagggccttccattacccagacgtctccttccttaacacgttcaacaccataaatttttgttgcagactcaaaagctttaatagtgatatatttttgaggagcatctttgcgaagtgcacgtccttggaatgactcggccttcccgtctttattaaaaataggaatcactaaacgcggttcgggaatctctttcttatacgtaccaggttgaatcttgttgaccaatttgggccattctaatgtgaaccataatctattccacgattctttaggaatacaccgagacttaacatatttcacaataggatgctcttcaggcagcttgtccagacgagaacaagacggcaaagaatttatagtctttttctccggttctggtttatgttcaggaaccttttcaatctttggttccattctagctttttctttacgaacttccattagatactcgcgataaagctcttcatcatactcttttaagtatccggaaattgtattgtggtattgacagttatagcaatgtacattaccaggagtaccgccataataccatccgcgagctttcattgcatctgtctgagagtcgccacaaactggacaacgaaacgttaatttaaatgtgcttgaattattgatttgtctaaaacgaggtaggtgagaaaacgcacgataagcaaattcattatctatccattcagccatagtattctccagaggccttaaattaataaggccatcatatatcacaacttattgatatttactttaattcgctttcttttcttggaaggaatttgttctggacctttatttacgactgcacctgtagttgttcctgatgcaatagcttgagggctgccacctgaatcaccagcaaccatatcctcaaataaagggagttctttaaatatttctttctgttgttcttcagtaatgttatagcgtgaagctacagcgctccaagcagacatcattgaggccattccattaagacccggaacagtgctcatcattcgcttcattgaacgaactgaagcatgaaaaggtgtataagccgctttctcttcaggagtggaaggacgtttaagaacacttccacgttcgtcgattattttggcttcgtacgctttccattctgtaaaaggtttttgcattagtcgaataaacttatatgcgtaaacagaatctattgcagtgttaataatacccataggtacctcctgagtatatttaatcaatcacaaaagatcgctttatcaccgttcgcatctgtgacttcatatgtagtgtcttcatagtgtggaatattccaaattacaccatcattagcttttacgctaatatggcattggtgttttgaaacaacttcataatcttcaaaacttgtaaaaacactaattttagaaccagtgcaaattgcagtagtcattttaacctcgattcataaatgcattaaatatttggtcatcaacagaaatttctaattcgacttcaattgcttcagccttttcttcaggtggtaattcgtatccacacactacaattttttcatcgatatcaaaatatacagaagcaatacgattaatgttactttcagttaagtctaaatcaacatcaacatctttttgacctacacttaaaggataactaatacgggttattttattatctttaacaaagagtccaccaacatactctgtactacgtttgaagtttacacgtttccgaattgaaagatatgatacatctttaccgtgagctcggctcataggacataatgaataactagaataagagatatcaaatcctacgccttcaacatgtgccagagtatcatgagtaaaccaattatagtcgtatgccaaatccattatattgtaatatgtgaaaggcacaggattaacatcatatgttgtacctttaaaatctgcccaggcaacgatttcgttatctttaacaattacaaaaattacaccaatatggtatccattattattttcattcggcgttatattataacattgtgcattaggaaatttaccatatttaaacggcgcgtttttgtgcatataataaatcatattattcacctgtgatttcggttacgatatctttgttatcgaaattagggtcacaatacaaaacatagttgtactgcatgataccgccagacttaagttgttcaacaactttattaaccatattaggacggtctcgtttagtaatgttcatgatatcagcgaagagatttgatgttcaacatcttcttgatttgcagtcattgaccactcacagaggtctttatcataacctgccgtaactggagctggtgcacacgatactgcaagtaagattgctgccaatgataactttttcattttaactccttagttgatttgataggactactatactatagtccatctataatgtaaacaagtttattctttttcgcgaataataattacttgttgaggctgctgagcagatttcttttcggcaacgatagaccaaattaaagttccaatccaaccaatcatcgtccagttaaagagtaaagatacaaagaagattgctgttgtgctttttgtgccacgaataagtgcgattacccaaggcaacatgtaaatgatgattgaaccaatacctgcgattaaaactgctactgaactagctacgaataattccatgttaatttcctcttgatttgttatgtttataatatcttgttttaactttggcgtaaaaccaattaattaaatttgtttaaacgttcaacacactggacgtagttattcgcgatttgtttctgggtaggctctttaccagttgtttcaacatagcgaatgaatgcgatttcagtagcctgtaagcaatgttctttaacgcgttgttcttttgacaatgctacagtatcagagtcacgataacgttgagcatgggcatcagcttgaatcattcgattacctacagtaaccgggtcttctacttcaactttaggttggttgtactgtttaacattcgggttataaatcaattgaccaacattattagggataaagccgtgagcaccacatccagttaatccgaataccattgctagagcgattaattttttcatttcaatttcctctgtagttgataaaaagatagtaacacagtatgtggtgcttgtaaacagctattttaaacttttgcgaaatttgcgtttttcttgacgaatctgacgtttagtcggacgtacagatcaaatttaacgaagtccactttgccgtgaggaaacttttcagatgcttcacagtccatcattagttcccatccttccagaataagagctttccattgtgtagttgatgcaaattcgtatgttgatggtttaaacacagttgagtacatattatcctctgaaatcagcttcaaaaactttctcgtcattaataaatgctttaactaatgcattgttcacttcagcaagttgtaccgcaacccactcgatttcttcacgatcacctgataacatgatatctttagtgaacatctcgccgcttttaaaccagccaataaaagtaactttagttaatttgcccatatttcctcgcaaaatgcccattcagcgtgataaactgtagcacctttagtatcattcatttgaactacgtctaccggagaaattactcgatagagacgtggttcacctccataagagcgtgctgctcgtcctgcataaatctttgctaaaccgatatctttcagtaaagaatacacgattcaagtttttcttacgtccaatttcagacagaactcctgtttcttcaggaggacaaagcatattttcgatgttagctgaactacttgaaccatgataaaaatcttaaattctgctttacaatcgatggttttcattttgttctccagtagttgataggtctataataacacaactactggagaagtaaacttaaaaatgtaatttagatatatctgcgttgatttcgttttggtttgcgtcgtatgcaattaaacgaaccgctttagatgggtcattcaatgcatagaaatgatggaacattgctcgaacgatatcgccatttacaagttctacctggataggagaacctttttcgagttggaaatgttcataagctttgatggttcgcagataatcaagtttttgatttccggctccaacaatttgtacgatacgtttgcccatgttttccatacgagatacaatagttttaggagcaagaataacgtaggttgccagcggagaaactacttcaacagttgtgttttcggtgattgcagtaaaaattgcttgagacatattcataatgttttcctcttggttggtgtaagtacatcatatcatgcctagaggaagatgtaaaccccgaaaggagaccgaagtctcctttttattaaaattttaactcattggctaagctatctaggtcagcacgtgttgctttggctttacctacgcgttccgtacgattcacctctgcctgacgcatctgagcacctgcgttttcatttactgtgttaggtgtgttcatgccttcttgctcaatctcaacccatttctgattgcctttacgtacacccatcaagaacttgttccacttattcttatcaccatatcgtgatttgatttgtttgataagttgttgttcagcttgtgcaagttcttcagtttcaattacagccaacatgaaatctgccgttgctggtaaacctgctgattctgctgcaatatcgctcatgttcatgtctgaagcatcccatgctgcacgtcctacttgagctgcagtccatagaactgtttcagattctactgctaatgcacgaagttcttctgcgatagctttaactaatgtgtaactattttcagtgtaaactctgatacgacaagacccacaaatacctaagtaatcgactataattacagacggcacaaagttcttcttgagtttcaattcattaagcaatgcacggaatgtattagcattagctccgccagtaggatactgtttgactactaaacgtcctaatgtggattttgaacgccatttttccatcttggctttatattcagcataagatacgttaccatcatcgatatcatcaagtgatacgtcaagcatgtttgcatctatacgcttagcacaaacttcttcagccatttccatggaaatataaagaacattatgtcctgtttgaagataatctgcagcaagtgaacaaaggccctaaagatttaccaacgttaacacctgccattaaaacattcagtgtaccggtttcagcaccacctttggtgattttattcagaatgtttaatttgaacgggaccttacgtgctttatttagataagaaagccagcgtgcttcatagtcttccatccagtcatgaccaacataactatcaaacgaaattgaaagtgcttgacgcataatatcaggaatagctcctacgtcaggcattttcttgttacgttgttctggaggtagttcagcattagactgaatctcaatgattttggatgtagcattatacatcgctttttgctggacatatttctcagtttctttaaccaaccattcgtggtcttcaggagtgtcagccaatttttcaattaggtctgaagttcctttatattcggcttcagttaaagaactgttatctaaagccacctttaatgcattgatagatggcattgcattatattcgttaacgtggctctttataattttaaagacatttttgccggtccacgctcaaaatactcagaatccatataaggccagaccttagaaaaataagcctggtcgtatacgagatgagacaaaataatttctaccacgataactccttaaaagaatttaaatttttcttggttcgttcattaaaagcttgttgtacctgcattgtaacacatttttcaacatgtggtgcaagttctgcttttctgtcctggtcaagaactgcaaagtccattacgattttaccatcaacccagtctagttttgtaatatagactatatgatgggaaccgtcttcaagtgtaatcagaatctcttgaatgacattttccattgctgaacggataattttaagagattcattaaacactcgttctttgcgaatgtcttccccttccgaagaaggggattcatcaacgatttctagatttaaatcatcgagattattcatcgaaatcttccatttcgtcaaggtcgttttcaaattatctgctgcagacggagcatcagaagctttaaccggaactttagttgttgctttgcaattaataaggtcgttaacagcgtcatcaacttctttaatagaagagatagcacctagtttatatttagtttcaattgcatctcggaaaggtttgtgtttaaacaacggcccccagaattctacgcaatcagtagctttagcacgccatgatttctcttcacgaatcatttcacctgtttcttcgtcaaggaattcacgagcataccaaccagctttaggtttaaccacaaaaccaatttcagttgccatttctaacaagccactgaatgggtcaataccgccatcaaaattaaccgtgattgggaaagtagatttctctttaactgtacgagatttttctgctttcaacgtgaagtcataaccggtcaattctgtaccttctttaacctgacgtttagagataaaaaatactgtgttagcagaataaagaatacctgtaccaccgcccataatctctttaggatatagtccgccgatttccattgctgtatggttgattgcaacacatggaatatctttaatagtcagatacggggttacaatacggaaaagagatttaagtgccttagcacgagacatatcacctacgactttctcgttcaatgcatcttcggtttctttcttagatgcagtgttaccgattgaatcgataaagataataactttatcaccgcgttcaatcgcgtcaagctgattagtcatatcaactttaagttgttcgacggactgaattggtgtatgaactacacggtctaaatcaacacccattgaacggaagtaagattctgaagcaccgaattctgagtcatagaacaaacagattgcatctttatatttcttcatatacgctgcaaccatagttagtccaaacaatgttttaaaatgtttagaaggtgcagcaaaaatagtcaagcctgattgcaatcctgcattcagagcaccacctagtgcaatattcaacatcggaatacgagtagggacttcatcacgattattaaacagcttagacttagtcaagtctgcagtcattttagaagtagaagctttaatcagacgagattttaaatcagacattgtatttttccataggcatcattatattttactcatgtttaaaagataagatgattatatactaagagttatacagcatttaaaactttaaacaggctcttaacgagcccatttgataatttctgtaatcaaattattacgttcgcttgcattaaatcctataactttgttagcaccatcatgattaagtaattgatacgtttggattttgttatgaattgcaaactcttcaaaatgtgaaatgactgtattaaaaccgaatgaagacaaagtaataagatcgtcttcaaaactttcagtcatttcgttacgtgttaaaataattgtgaacacatcatggttttggcaaagacgaatataatcctgttcgcataaacgtcaagaaccgagtccgcatcttgtcgaatacgtccataaacccagttactaatatatccacggtctaacagataaatcttagtagggtctaaataattcaacatcgtttcgaaacagccaacttcatttcgagacttaacatcgaaacgtccatcaactgttcgtttagggaaatcaatctttacatatctttcactaatttccattatgtcattaatgaaagttgttttaccagcattatccggtccgtctactaaaataattttagccattttattcctcgattacgacatcttcgtatttaggtatattatacggtgaagaaattaaagcattaaagtagatgaactcaccaagacctggatggaatacttcttcaggattttcgaaatattgaatcttcggacgtcctttaagaatttgatagtactcagttttagttggattaaaaattcgaatcagcgcttcttcgggatacttatttctgtcgaatactattattatttggatcagttatataaagcggttgacctaattgaattgcgcattcaaccacttgttcaaaacgatagcatgggtcactaattcgaaatggatgaaaaataccatctagatgaataggagccaaatcacctacaagacgctgcatgacggaaggacgtataactttctgcgttacgataatcttattaccatctgcacctgcgttaaccagcacttctttttgacgttcattcaacacagtagtttgaagtgaacgattaaccgacaacatatcggtttttaagaattcgtcaatataaaaacgtggtttattagggtctgcagtgatattgaaattgaattccacatcaaaagcgccgtcatatccggtgatatctgtgattagaaaatcacaatcataataagcaattaatgaatcaaccacaaattcattttcagaccagaaatatttacgagtgttatacgcgttatctttataccataatggaacaaaacttaaattctgggaaaagacgttcacattctttaatatcggatgcattacgtggatatgtaatcacatcacctggattagcacggtgcaaatgaagttggaagttgccatccttaaggatagcatactgtccagtttcataagaccgcatactcaagattggtacgcggaaaatagccattagtcaaggaatcctttaacataatcaaaatcacgttcaaacacatgggcacttaccatggtatgagtataatcaccaacttctacaccacattcgttagcgatataatgaagtaattttccttggagataaaaatccaactgcataacaacagcacagttctgagaacgcatatgacagtgggtataaagcttaccatcacgaatataataagtcactgagtcagtacatggatattcaagtgtttcgtccgaatcaagcaaagcctgatcagaactttctagaatttggaacacaactcttcgagagttaggtttctctttaagttcttttagaagagctggtaattgggccacaatgcgaggaccgtagaaagtgttgaagttcgccggcaaaacatctgattttggtttagaaataaatttagcgacattaggatatgccttaaacgcttcttctgcgttggtaccaccagaaatcataaacttccagaagtcttcggcatattcataagagatgcggttaatacgtgggtcggtcattttgaatgatgatggagtgtcaacaactactgtcatggacccgatttcattacaacgtccaatacgagaatcagttacgaattcggggttttctaaaatttcacgattgactgctttaaatgcggcttgaaaatctgcggctttgatatatttcattgtgttatgttttcccatgtttacctcaatacaatttattatatactcaattcgtaaagcttatttgaatttcttggcaatgttgatataacgtaaagcttcagaatctatacttccaagagaacacactatgaaggaatgcatcagtgtagtattccaattgaacaggttctttaatcactttagccgctttggtttcaaacaggcccataagggccttttaagaatttgttcgttagtgttcagttttatagtcaaaatctcttcattaagtttataattaaaagtttttctagaaatcattccgggtacctcaaagcgtcatcagagttagttatatcaataatagatatagagttttctgataacccatttttagataactgacgtttataatatctttcacaatatgtacacgtcgtcccgcagatttcattagcacaatcgaaatctggatgtctgaaccacctttttctaaaaagccatctaacaaagaggtttcaatatttactgtatgtgaaaactcagtctcattttcaagagtgaaaatagtctctaaaggcttccacagttctaacaaattaccttcaaacttttcagaagcgtatgcttcaagaactttcaaatgtagtcggtgctacctgtacgtcctgaaactttgaattgagtgataccaatatcattataaagtttcaaatcttgaggacgaacaaaacgagttctcaaccagttaaatgggtctgtatcacgagctttaatacagtgctgcataggatatccgtttaaggatttagcatcatcagctgtaacatcagtactatggaaaatatagcaagagtcacgatagctacaatgtgttgtataccctttaccagcattagaacagaactcatttacaagaacttcaaatattatattgttcttattgcaaaactctgctgcacgcttcaggaaagaaactgaacggttcttatgaattccgcagcagacttttttgatgttatattggtcgtgcaagtatttgatttgagttacagcatcaacatgtagaattgttgaaacttcaatctcaatgtctttattgacttcacgaacaatttccataacaacagggttagcgatagtaatacgccatacgcctattgaccaaagatactgaacataatcctgaatagctttcttcttccactcaactagttctcttttgaaccaggatttatcgtgttgagtgtatagttaaagcaaatacctaattcgttacaacgtttaacgtagtcttctaacatcttttgtcaacgtcaggaagcctaaaatcaggtctggctgctacaaaagccatttctcttgtagaaccatatacttcgtttatcaagctattaggataggttttattgagctctacgattttatcaagaagagctaaatcaaaattcgttccgattttaaaagtattcatttttgcatctcgcgttaattgatgcgatggttttttgcaggtcttacttaaattattatagattcggtttatacgatttaaatgtttcgaattcgcctttattcataagagctttgaattcgtcaggacgcatagctttgtcgtcgataatccaatcatatactggtttatgtgttagcaaattatggtacttcaaaccaatgttttccaagttctgaatcagacttgggagaatgtcaattgctatacgaccaggacctaccgacttcataccacgagccgtgtaaagcgttatggtatgccctgcatcatacagggcattaatggcggacaccatttcgacgtctggtttgaagttcacgtaatcacgattgttattccactctgttatacaatcatcgacatcaaaacaaagattaagcatgttttctacacggtgcattagattcgttcccattgatgagtgatatcgccaccgattggacgataggaaacaccagtttctttatcagttagtacccatttaccaggatttttgtaatcagagtagccgttacaggttctgctacgtcataactaatagagccgtcctgaagtacacggcccatgttacgtaattgcttagtcagaagttccatgcctttataatatgcggctaccgcagctttaagtggattattcttgaaataaccacctaatgcaatccagataattgctactgccaaatgatgatactcgttaaacgaactcatctttccatatttgtaaactagtggattgatgttaatagtcacattacaagttgtttcatcaataataaactggccccaggtcggattagcgttgaattcatcataacctgaaacagcataaagcactttagcttcatcatacaattttggcccgtaaatcttggtttcaccaaaatatccacgagggtcgataaacttgacttcgccgttatcagtaatcatggtattactgaagttcgggtcaccgtgaataacagagtactgtccctgagaacggttatgataacgaataaggtgttctaaagcttgtttcaacattggcttcagacgtccaatcttagtgtagttcacacgtgtgattttaccaaatgaatcaatcaatggttgaatgctttcacaacgatcaataactttcgtatagaattctttagtgaaatcacgacgaacagtttcaggacttacaaaataagcgtctgtgctgaatttcagtgcatctaaaattgcatcaacaatttgtggacgagcaagacttgatttggatttaatatattcaaatgctggcttacctttaatacgttccataataaagtggccgccaggatgataacttacaatccgtggaactgaatctgatttaactttcttataccaattgacttcatctttttgaagtgcaacgccctgttctgttaaagcaatctttgttaccgtttcttcgccaatttcaactgcattaaaactacgattaagttcacgaacttcatgagctttttcaagtttaggcatatcaccaaggtcgatgatattcataagctctgatttattgaatgcgccgctgtaaaggaattctacaaaatcacgtcctttgcagtattcgtgaatttcctcatcagtagaacccatgtagaattcccccagtctttgaactgataaattcctacaacattaccgcctgttgaacctacgttagtgatattttcaccatcgaaattatatcgacattcatcacctttaacatagattgcgttaacattccaagaccatgaaccaaaatcaggaataatatcacaccagttaacaactacgttatggccgtctaaatctttatgtaatttagcaagagcataagcagaaccatacgcttcatcaactgtacgaatagtcacattgaacccttcttgctcacaataagctcgaacggtttcagcaaattttgaatgaactactacaataatttcatctgcgccaaggtcagaataaattgtgtacaaattgctcagaatagtgtcttgtttatagttcacaagaacttttggaatatggtgagtaattggatataaacgagttgccaatccagcaccaagaataacagctttttcatgttgaagtcctcattggtaagtaggtgtattgtacactattctagttaaagcattcatactttgcctgtagaccaatcataatccatccaattacaagtgttggaatcattactggagccgttaagctccagtagatagtcatgacaagcatcaatagtaaaagtcctattgttattgctttcattgttcgcctcgtaacatggcacctagtgcaccgccagggtggaacttaaggaagtcattagaggtaaatccacgttcagacgaaaggttgatagcgaacgtatcgataagcgctaacaacaatgtagtggacattgtcggagctaaagagttctcgtcgacttccaccgcgataccggtacagaacgtataatcaaaaagagcttcgtattcttgcggaatgtcagggttacaatgtaacagaatctgtttaacctgaggacgaatcatacgaagatgtttagcaacacctatcatttcttcagtcttaccagaacgactaatatgaatcaacacatcattaggcgcaatgatgaatcctgcatcaccgtgagaataatgcccggtgttcaagtacatactcgggataccgagtgaagcaaatgtctcagaagctttagttgcgatattagcgttcttaccaacacctgtaataattacacgactttcataattactcagtccagggcgtcgaagagtttctagaatagcattataacgagcagggttttgactaattactttagccatggtggcaagagatgaagcttgttttacgattgcgtcaatagcgatagtgattggtgtagttttcatatttctctcatttaattagttggccgtccttggcattatatcaaaaatcgaacatatcgaacagagatgctttcttctcgtaatcgagtttcgctgctgatgtgaatccttcaagtggtttaataaatgtcttctcaaggagaaccgtgtagtccatccaatgaagtacgtcgtctttaattaaatctgtgatttcagtaccagaaggccatgcgatacatttatcaccgaatgggtttccttcacgtaaaggcagaacatatactttttcaccttctacaacttgtggtgcatcaatattacctttaatagcccggttatacgtcagaattccacgaatatggaacgggcatttgggaccagggaatccaccaacgtcatatttagcaatgttattcgcagaagataccgacgcaatgctaatataattcaattgacggaattctttttcaaactctttaaaatattcttgtaatgattcttcaccttcttgaagcatacgacgaatacattctttaagagctttctgtaccgctttaggagttgaagatttctgtgtttcgagacccatgattttgagtttaggctcagcgtaacgagtaccttccatatcccacacgtttaatgcataacgtttcttaccagtccagaatccgccaatacctttagaaccgagcggaggaccagcgatagcttctcggtccatgaacatcaaaggtgttgcttattattcatgtattcgcacatttcacggaaacctctatcaatagctggttccatacgttcacgtgcaaacttatctaagaagtctacccaatggttggtatcacggaatttagattcaccaaccttatcaataattttatcagcagatacgtaaatagagtctgtatcaccataaagaacgaaagcttcaccttctgtaccacaaacttcattcagatattcattaactttacgttcaatccactgtaaagccatttgaccaaatgttgtgattgcagtagcattacgcaaatcgtaataacggaaccaaacgttgccaagtgcaccataaagtgagttgataagcaatttacggttaatttgtgcagtcatacctgcaacttcagtacgttgagctctaaacaacatttcattaagagatttagcagacaactttttaatcttttctttaatctcatcagtgaagtcgaaacgataatcaacatctaatggttttcgtcaacagaaagattaggattatgcaatgcctctttaattatttcaccattacgttgagctgcaagcatgtaacctttatgttctttacgttgattaaagaccttagtgatttcagttggaactacaccgtcacggtctttataatacatcatgccgttaggagagcaactgtacacatcagaaggacgttcagcaacagcgttaatataatcatgcagtggagctactttaaacgttcctgctattgtttctgggctaatattcacttggcgaataatacttggatacagagatgtaaggtcgaaactcattacatatttgtatcgatttggaataggttccttaacaaaagcgccaggataaggttgaaccgggtgagaacgaccttgtggaatcaccttgttttgttctttaaggctattaaaaataatagcatcccatgttttaattgggctaaacacagattgaatctgtatcttagcataataacccatgtccaaactcaagttgatgaactgacgcttagcatcaatttgcaatacacgatacacgtcgataatgttataagaaatatatcgttggtgattgctttcacgaagcttagaaataggaccgtcatatttcagtttaccgacattcaattcaaattctgaaatgtaatccagagaatacgacggttgattggtaaaagagaatttttgtaaaggtcaatgtaatcaagaacagagataccgaacaatgtaatgatttcacgagaaccatacatgttttcgataactttaacacgagttttacgatgtggtgataaacgtttcgcagtagattcgccaaaaatatttttgattcggttatacacatatggaatatcaaatgactcaacgttccatccagtcaaaatgacaggagttttctgttgccagaagttgagatattccatcaacaattctttttcgttatcgaacggcatataaatgattttatcaataatttcggatggaacttcatcaccaccttgttcttgaagcttagctgcaatttcgatagaccattcttctacattaccatatggagaattcaatagatcaaatacgtagaacctgtcgtcaattgagtcataatgggtgatagcatcaatcggatgttttgcttgtgacggctcaggaaacccatccggagatgttacttcgatgtcgaagttagccacacgaatttttgtatggacgtatttgatttcatagttataagtgtcagacaaatacgctaatttgaaatcgtccatgccaagtgcttcaagtccgatatcttccatgcgtttaatccattgggaggcatcacgcatattagcgaacaacttacgagtacatggcttaccgtagatatcgaaatatttcgtagcctgactttccggacaatgagcaaacagtgatggtttatattctacttcacgagtacgttcacggccattagaatcgatgtaacgttcaaaaattgaatcaccaatctgttcaaccgttaagtaaaattctttcatttaatttcctttagacgagttattgtcttttgtttgttgatgaacttattatactccaaatgggaccgaagtcccattgctttaattaccaattgtatattttgctttcaaagtccagtcatctttctgtttaaaagagataacacggaagttattagtcaagccaaacagatcttcacgagcagagtcttcaataacaattaatccccagtcttcaagcaactgagcgatcgaatcacgtcgctgatagtcttcaccatcgatatcaacttgtcgtccgtccatacgcagcatttctttaaagtggacgatgtagtatttaccttgcttttggaggatatgacaggactgataaagaactttatccttgttattagcgatgcccatacgggtcaaagtctctttgactttcagaaaatcttcagggttcttcaatttaatttcaatcatttttaccattccaatgctaattttttaaattgtttttgttcttttacgtttttagtaacttctttgagaaactcatcagtgaccatggccttcagttctttaaggactattggcaacttgttatttttttcaaggagccgcttatactcggtagcatcattcatgttgattgtgtaatgtttcatcaacagtttgataactagtaactctgaagtgtcttcgactagtttagcccatttagagaatcgacgaccacgcggaattgccgccatcatatagttgaagtgcgcttcatcacttaattcagaaccgactaagttcatcatgtaaacggctggcatacattctgggaactgggatagtgagttctcaaccataaattttgagtagtcgacctgagcaattgacatagatttcttttcattaatagcattaatgattttaaagaattcattctcaggtttttctttaaacatatcagcacatttttgaatcgcatcagcgtcattagactctccatgcaatttggtgctcgttaagctggacgtcatcatcgaataagttcatattatttccaagtcagttcgcaggtcagttgaagaagcatatacataacatgtaattcaatattacttgctagtccatgaaacttattattttcgcctgcaatttcgtaaagcgaaataatacttttaccaggtgcaacttggtcataacattctgaaactaatttatcgatgaaccacgaataatctgcagcatattttggagctaatgcacgaagctgtttgatatctttgttcttcattgcttcgataacatcagagactgttccacggtcattagttacgatagacagaatacctgcatcaagaacacctttagacgagtactggtctaattggccaattgtacgacgaaagtctgggaagttctttttaaccagagctgcaacaactttcatatcagcgatttcgatattttcgttcttacagatttcaaccatacgatgaatcattttcttcatcatcgagattttatcttcttcagtcggacgaccgaattcgataactcgacaacggctacgtaatggttcaataattccgtcaatgttgttagcagtgataataatagagcagttactagagaattcttccataaacgtacgaaggtgacgttgtgattcggcgaggccactacggtcaaattcatcaataacaataactttaggcttgccttccattgagactgaacgagcgaatgcagttaacggaccacgcacaaaatcaatcttacaatcagaaccgttgacgaacatcatttcggcattgatatcattacataatgcttttgctacggttgttttacctgtaccaggagaaggagagtgcaaaataatatgaggaagttttcctttagatactaaagacttgaatgtttcgtggtcatacgcaggcagaatacattcgtcaatggaagaaggacgatatttttgttctagaatgtgttctttggaattgatagtaatcatgtaattttcctcattatcattaaactggaggatttctcctccataatcgtactacattaaacgtaaagctttgacttagaagtcgtgagtagaatcggcttccattgcaataacataacttacttgagagctttcaaacttggctgcaactttatcaccagctccccacaacattactttatagttacctggctggattttcatattagccatattgattacaaagttaaagttattagaaccatcataatcggtaagagtcaaagaatacttaggacgagtcaagccagaatcttcaactttattgtaaccattgataacaattttaccatctttatttgtaatagcaattgtatcaatctggagaccacgtgaaactcgaagcaattgttgaaggtcttcagctttaatttcagtaatcacagaagccactgggaattgaattggcttattaggaaaaacaatggtgctcttgtcggcggcagggccaataaaccgtggaacgtgtatctgcaattttaatattgccatcagtgtgcattgaaatttcagcatcatcagacactagactcaaaatgcttaagaagctattcaaatcataaagtgctacgtcaaaatcaatttcatcagagatatttgcttccgcataagtggtgccattaactgcacgagtcataataaatttaccttgactcagcagaataccggagttaatagaggcaaagtttttcagaatagcgatagtatctttagacagtttcattttatttcctttcaagacaattcaaagtttataacaaatttattatgcagcaaccatctgctttttaatagcttcaggcagtgattcaatatattctggaattttagaagcaacaatttcgccagctgcaattaattgttcgtcggcatcaacacagtataaatcttccagacgctcagaaccatctttatcaagaacgatttttccacctgcttcaatagaatctttatagtgcttacgcatcagatgaatccacatatcagatacatcgttatcaataaaaccataaatcataaaacgagtttcttgtggcaaagattgaagctttttagcacttgcgtcatcacaatgcaggacccatgctttacgaacacgattatggttatgcgggttagcgtcagtacggatagaagtaactttcagatcagcagcagtgaaacctttagcagtagtaaacatattatttctctcttattcgtagaagtcagtaactgtccatgcggaattgcgattagacattattttattatactcatctttaaaagcagatttgagcatttgttcagtaacaatatgttcttcacctgaaaacgtattggtcaaaacatatttttaatttcagggacaacaagaagatgttgtccggttgaatactccatgttgttctccatttaatttgatgtggtcattataaccacatcgtgttaaagcgtttatgaaacagtcatcacagtaaatcgtccaactttactcatctgaagatgttgtccataacgttgagggtcatggtctcgatgagagataataaacacattagtattttgtaaacttccaagaatggtatctatagccttaacagcctcagaatcgacagccccatcaaaaacctcatcaagaatcaacgtgttgattttaacaccagaaactttttcagcaatatctcgccatgtaaacaacaatgcgatatcgatacgtgccttttcaccttgactaaatgaagcataactaaaatcttcacgaccacgtgattttatagattcattgaattcttcgtcaatagaaaacacataatcagcttccatgattttaaggtaatggttaatctgcttgttgaacagaggcacatattttttaatgatagcacctttaataccagaatcttttaacatatctgttataataccacgatggtatttttcaagaacgatatccgattttgttttaatgattttatcaagttcttttgaagcaaagctatctcatcggcatggtcgataaattccgccgaggcttgttctattgcagctttaactttcttagctttatcaatagtggcaatcattgcttgtttcttggtacgaatatcagatgcaaggtcctgtttagtcttaacattagctctatattcgtccactaggacactcagattatctctgtgacaggtaagttgctcgaatgagtgattacattcatgaagcttatcggtaatcttagagacaataggatcaccctggtgcaactgtgatgcacaagtaggacatgtgccaccgtcatgatacatcttaataactttgttatatgagtcaattttagatttaatcaagaatgcttcttgaccgatcttgttgaatgcctcagtagggtcttcgtcaagaacgatattaagtagacgctcgttagcttcttcaatttctgcttttaatgaacgagcttctttggcttaggtcgtcatacatattctgtagacgcgctacattatcgccagataatttcttttgacgttcgatattctcgttataaatcttaatttgttggataataccatctttcttggcatcgagaacttgtccctgggaattaagttctcgaacttgagacttattgattttatccatttcagcgagtgttccaacttctaataagtcttcaacaagctttctgcgagcaggggtgctaagagccatgaaaggggtataccctgccgtcccaagcacaacgatctgtttaaaagacgcgtatgacattccgatgctacgttcaaattcttcttggaagtcacgactgctggcagattcatcaagacgaacaccgtcaacggagatttcgaaaatattgggcttttggccacgtttaatgaagtatttttatcatcgaattccatccaaagctcaactaagagctctttcttgttcgtgctattaatgatttgtcctttcttaacatcacgaaatggtttaccgaaaagtccgaaagtaatggcttctaacatcgtagatttaccaccgccatttttaccagtgattaatgtcttttggactttatctaattggatatcgataggattcccacctaccgacatgatattttgataacgaacacgatttaatttaaatgatttcatatgtattctcttcgaatgaagtcctctacatattttaacatgtcatctctatcagcaaaatactcatctagttctgcatacataacaacacccggtgcgtactcacaggtaacatacattgttccaaagaaacgaggagttgattcctcgtaattctcagtccattcaacgataccaatataaccgtcaccaatactaaattcatgacgatggatttcataatcagtcttcgtcattatacgcatcctcgatacatgcttcagtcattttaagaatagagccaggagtatcgttgtccattatattaaagctaaattcaatagcccagtcggtacagacatgaacagctttaacttcgttgccttcaacgcgtaatggctcaatccaatacttgatagtgttctcgaatccatcatcatctttaacatctatttcaacttcaagaccgagcccagcattgttaaattcatctaaagtcattgtgttgcctcaatataaagttcgttggaatatttgaccagcgcttctctgtcttcgtctgagatatctggaatcgcgtcaatatattctttaatgatatcttgaagtgatttaatctcgatttcctggtcgtcatcagattcaacactgttatcaactttagaaaccatacgaagagagtgaactactttttcaagttcagattcaaacttagtcaactctgaatcaatttctgatactataacacgtacggctagattagtataatcagaataattgattttgcctttaaatggataagtgattcgtcgatgccatgttgtttcattaggaataaatttccatacgttcaacatcagtgtcaaatacccagaatccgcgagggtcgttctcatcgcctgcagtaagggtccacggtgtcccaatatatttgacgttagcagcttcagagattgtgtggaagtggccggaccagacttgtttataggtctttaagaaatcaggttcaagcccgtgagacttcattcctttatagaaatagaagccatttaattcccagtgcccaacacaatacgatgcagaagaagtcttgatatgctctaagatttcacctgtattttcttcacacatccatggaacgatatcaatcagacatccgtcaaaatctacagtagttggatgttcgtaaatagtaaagttttcaaattgagttaacaattcagaaacagtgttaggtgttattgtattcttaaacgccatgtcatggtttcctatcgtgacatgaacgtgaatgcctgctttagaaatcatatcaacgatttcacgattgaattccatcgtgagacgatgtgtaattgctttacggacgtcaaaccaatcaccgtattgaatccaagttttaatcccgtgtttcttagagtattcaattgcttgacgaataccatcacgttgaatatcttgaacccatgggtcgtcttgtttgactccgatatggaagtctcctaagtgcaaaattttcatattatttcctcattagttaattcattctatcatccgtttataaagcaaaaaggaactccgaagagttcctatccacatagtacaccgtacagaggctcatttgaacttttaaatcgaatgggcttgtacgtaatagttccttcggctttagctttatcataagactctttaaaacgtctcattctttctgctttgcctttacggattttatcgaaattttcagaagtcgggatgttcgtcatgcataagcacctctcagaaaatgcctaaatcgatttctctcatcgtttccaccatttcttaacttgaaatgaatcaacccacacgagttgttttgggtctgcctttacaataggcggacaaatttctgtaatagaaccgtcgtgatattccttttcagaaattttaacacaaagaggacctcccaatttaagggtgaaccctgcgttcagattcagacgtttaaactttgtttgaactagcgccattaataatgtcctcaatagcctgacgagtagtaacccactggattttaattaacttgtcattatatggttgtcgtagaatatcccgagatttcttaatagcatattcgtaagcttcgaagttgttttgaattgctgcttcttgagcatgagcataaagtcgatttagttcgaaacgattcttttaagaatcttttcagatttttacgtgcttcagcttcatttttcttttgtatttcttgtagcattttagctactgcatcttctgcttctttattttcaataatctcggtagtcatattatctcattaaattaaaataaaaacgtccgtcctctcttcaatacagaactcgtactcaactggagtcccatttattgaaaatgacacgtcatgtgggttcaaagggtcgatgtcaaaattaattttaaattctcgacccaacagttttaccaaataagggattgcttcgtcaaaaggttcttctaagtagttagagatgtcaattgtcatcctcatataaaaatccaaactaggtgaatcgctaacaacttccttcttttcagccccaggagctttataagcggattcttcataatgcgtcattttatcgtagatgtcttgaataaacgtttcatctaccaacgctaccatatcatcgtcatgactgtcgtagacgttatgaacgaagtaactatatttctttgcaacttccttacgttcttttttgatacgttggacaaaagcattaaaacaagctcgagttatgtatgcatgtgggttattgtacttagtttcgtcgaaattatgaagtcccttaatagaggcttcaatcccatctgcaatcatctcctgcttccaagactgggtatatcctgaaaagttgaaacgtttggacaggccttcggcgataagcataattgctaaaccgatggtatcattctgacgaataattttgtttgggtctttattatttaagagctcctttttccactcgattatagcagcgagaagctctttattattcacatagttatttttaggtttttgttcagtcataagtacctcttagctcaattcataggtctattatatcataatatttagagacctatcttaaagcacgagatactatcggagcaaacaatacgcctggaatactttttccattaaacgtttgaactcatggatatcgatataaagctcagtaagaccggcattataaagaaaatctaaaagttctcatgtgtttcgttatagtcgccttcgtttaattgagatacatgagtttcccaaaaccgacacctttaacgaatggaaaatacgtaactttcataaaagttgtcgacgtaaaattcgcccagcttttcttcagttatactgattcgagttaatttcattctagttcctttgccgcttcaagagcagcatccagcgaatcaaattggtcaacgaaatcaatattcaacgcatcgtcatccgtagcatataaccaccattgtttgaattcgtattctagaataaatccaagcccttcaatctgagaaagacctagactatttgtaccaacttcgtaaccagctagacgcaggtcattaatcaaagcttctgttaatacgctcattttaccgccttaacaattttcaggtcaacgaatttttcttacgttgatttttcatacgacggatagtcttttcagagatttcatgtttctgataagctttagattcaacaccaaatgcagcaacgtcaaattcagaaagaatatattgtactagaatttcacgaatagaattacgtccaattttctggtcgtgtttttgcatgatttcataaagatggaattcccaggcgtcaagaacttgaggagtaacaatattgccagattccagaagagcaacaactttatcgaaagcgaaagaattaactacgtttttgattttagtagacatattattttcctcggttattttattatccaacgagagaattatactcatctctcaagagtttgtatattatttttaagcatgaaaagtaagtaatttgtatcacgtggagtaatatcaacacccatatcaaagatgcctttatagattgggtatttgttttcggttgtatcgaagctgaaactatttccatcacaactaacagtaatagcatctgttaaaatgtcatactcaatcctaacggttgaatcgccaattttaacgtcgaggtgttttttgaatttgataaaatctaattcttgggccatgatattttcctcattttaagacgataggaagataataacatgtcttcctatcgttgtacattattaaccgaactttttacgcgcctttccagccttcgtacatagctgcacaagtcagtagtacagcgtgctggcattctttgtatttgtaaatccagaaccagcgtaaaagtcttcgtcctcaacgccgttgagtttcatgttggcaaagaatttggcacgttcttcacgaagttgccatgacacaatattttcaggattcattttgtgttccacgccccattttcatcgatgaacttaatccagtcatttacggaccatttagttgtatcgccctttggattaacatttaaagtatataatccctgcttaaaaagcattcgtttaatattcataatttcctcaactgtaacgataacattcgttagctttacgtttggcttcagtatgagaagtattataatcatactcttctttactgtaaacatctttttcaacttacgaacttctttgcggagttgtcgattcatttcgttcttgacttcagaatcaacacctttcatacgtttccatttatctgagcggaagatgttttcaaccatgtctttgtggctaacaccatcaggagctttacgcttaccaaaatagtcgtaatcgcgaactttcaaatctttacgacgatatgttttacccataagtacctcagaggttgattgatacaatgcgtttgataaaattcacttcacttactgaaaggtctttaagaccgattgattctaaacgctgagtaagcgtcaacatcgggatatagtcccaatgagttttatttgcttgataagtacgaacgccattagcaatttcaacatgcaaatctgaaatggtaacgaataccagacgctcatcattaactttaagggttagaacaactttctttgaatctaaactaatcatagtttaatttccttcgcgattgaacagaagataccacggtcacaaagcatttcaccaatttctggatatttgattgaacgataccaaacatctaggcttgaaactctggttatccgtactgcattaccgtttgacagaatagtactggtcgatattaatttctttatcttcaattgtcattttattttcctctatagcagtttgtttaatcttaacacatctatcgaggatgtaaactgttttatgaaaatatttttgatttgagaggggcacaaggagatagtgaagtgaagattctaatggattatattagaaataggataaagaagaccaggcggcacctggtcaatcttctatgatatcagagtcgtatcctaatgaaatcaaggactttttaaactctgcaatattcttttgtttcttatcatttaaaaatatgacaggataacgaatattaagtgaagtgaatcctgcacgtttagcaagagatacgattaaaggacggtcatattcaatcttaccattattagtgaggactttataaaatgtataaggagcattgagctcctttaaaagttttgtaacagtataacatcctggacaacgtccaacttcttcagggatgccatataggatttttcaatcttgttctttaagttcgagttttgttccacgagaaataattccttggtaagcccaataaggaggattaacagaatcctcaccagagttttcttcaggaaaataaacctggataacaaatccagatgcatcaaatgtaaaataaactgtaggcagttcacctaacaattcggcacgagcattaatttcttcaagatctcgttcacgtccagcccaaaaactaggatttagactacattcatagaaataatagtcattaccgaacatatcaaaacccttccaactctctaccacgtaccgctcaaaactaatcataattaagccttttatcaagaacagaattcagtttgttagtaattttatccagacgctcattgaactcactagaagataagcccttttctggagaaattaaactaatcacgaaaaatacaccagtaaaaggaataagaaaaatagctccaactgccataaacaaaaagaacgttacagttgtgtaagaaaatcagctaaacctttacgaaatttatacatatttacccttaattaattaaccaagcattgataagcaaaccatattgcgaataaaattctggaccaaaacgaaaaatcatatcatttatagtatccataatgtagttcaatttaatcatgtttccacaccccatcggtatttgaccaaagtcgctgattatctgatcctcgccacagctttttggtcggaagatttttctcatacttcccatcaataataacatcaacatatttaagcatttctagttgtttaatatcttcaaacttgtatcctgtccacaaccaaatgcttttattgggataaagatttttgctgtttgaacaatgcaatgaataacatctcggttgtcaggatagagagggtctcctccggttatagtcaatccttctatataatcattattcaagcattcaattaattgttctagtgtttcaccggtgaatggaataccatttctagcgttccatgttgatttattataacacccttcgcatttatgcaaacaacctgtaacgaaaagaacgaccctgcaaccagggccattcacaaaatcgcaaggataaaatctatcataattcattggtgtttaaccctatgcatgatttctttatttttaccgagattaaatccgcgttcgttcggatttccaagataaccgcatgttcttcttatagtgttcatctttttaggatcagtttctccacaaactgaacaaacaaatccgttttcagtaggagtcatttcatgagtacttccgcatgtaaaacatttatccactggcatattaacaccaaaataatctaaatgttgtgcagcataatcccagacagcctcaagaccctttaagttatttttcatatcaggaagttcaacataagaaatgtgaccacctgtcgcaatgaaatgatatggcgcttcacgagaaatcttttcaaacggagtaatattttcttctactgaaacgtggaaactattagtgtaccagcctttatcggtaacatcttttacgcttccatatttttctgtatcaagtttacagaagcgataacaaaggttttcagcaggagtagaatataaactaaaagcaaatccagttctttcagtccactgtttaagatgagcattcattttagttaaaatttcttgcccaatatcacgaccaacaagaatattcaattcatgaataccaatgtatcctaaagacactgaacttctaccgtttttaaataactcaattatatcgtcgtcaggtttaagacgaaccccgaatgcaccttcttggtaaagaataggagcaacagtcgctttaactccttttaaggaactaattctacacatcaaagcttcaaaacataaatccattcgttcattgaacaattcgataaatttctgttcattgaattgtgttccaatataagaatctaatgcgatacgaggaagattcagtgttacaacaccgagattattacgtccatcaagaatttcattaccggttgaatctttccatacgctcaagaaactacgacaacccattggagaaacaggaatagatgagccagtgatagctttattgttcttagctgaaataatatcaggatacattcttttgcttgcacactctagagcgagttgcttaatatcatagttcggatcatctttataaagattaacaccttcttcaacaaacataacaagtttaggaaaaataggagttatcccatcacgtccaagacctttaatgcggtttttaagaattgccttctgaatcattcgttcagtccaatcagttcctgttccaaatgttatagtaacaaaaggagtttgtccgtttgaactaaaaagagtatttacttcatattcataagcttggaatgcatcgtatacgtctttttctgttttagattgagcataattcaacgcatcagcgatttgccatttttctgcatcttcaacatgtttacagcgtatgtacgtttaacataaggagaaagaactttatcgacatttgcaaatgtagttccgccatactgatgtgaagcaacttgtgcagtaatttgtgccataattgcagtagcaacaccaatcgatttaggcgtttcgatttgagcattgcctaatttaaatccattctcaagcatcccctttaaatcgactaaacagcaattagtaaacggaagagcaggagaataatcaatatcatgcatgtggataattccactttcatgcgcattcataataaaagacgggaccatatttttggcaatgtgcttagacacaataccagccataaggtcccgttgagttggaaaaacacgagaatctttattagcattctcgttcaaaagatctttattagttttataaattaatccttcaatttctttttcaattttcattttaaactctttctaagctgctttttgaatgaagctattaattgtgttttagtatcagattcattatattcaaatcctctttgaagcatctcagtcatcatttcctctttacctagtcttgagaactctttagttttgtctggaacaaaattaggatggatattattatcagaataatcttgtttcaaataagcaagaagagcttcaagccattcgaggtaatcaacgttttgacctttaagaccagaacggttgaacttatgcttcatttgaccttctgctgcattgcacaggttacatagtaaaccacgaaccttaccagcttttggcccgtttaattcatggtcgtggtcaagatggttaccttgaacatcagggtctaattcacggtggcaaataggacacttaccgttctgtgcatcataaaatttttgtttttcttctttatattttgcgcctgataataacatgataaacccttaccttaaatagataagggtatttataatttagtaaacgttataaaagtcacgatgaaaacgtttatattgacgaatcattttcttagtaggacgtgttactgaaataattgaagtcctcatatttggattgtttggggccccaatcataataaatttccaggatttttgcccattttttctttcaccataaaataattcagttttcataataaacctttaacttaaacgtctttctaaatattcaatgtattccgctgcggcttgcatcagattaccttcataaccgtcattattttcttgggcggctaatttagctaaagcataagaaatacgttcaccttcgaatttgccaagttcactgtcacaaactacttggtcaatttcttcgagttcatctattgaatgggattcccagaagcaccaaagacaagtatcacggtcatagatgcaaagtttctcacctgtgttcaacatcacttcgataatgccatggtcgccataaccatcttcggtagtagtaccaattaccttgatgattgttcctttctttaattcaggaaacttgacttgtagttcttcatctctctttaacaatcttgaaccatttaccgcgagtttcagaaatattcatatcaatattctctataaaagttacgatgagaacgtttagctttgcgaagctgacgtttagtaggacgaactgtaaatggttgcccagagaaaaaattcggatcggttttaataagcaaataccaatcgtgcttgccatttttaataaacggtacaataatttaacttgcataataatctcttcccatctccatatcaattaattcatttattgaaggttcatcataacatgtttcttcgtcgttgtaaactgtttcgacgtctggctcgacagtctcccatcgagcagaataccacggtttaaccccggagtttattgagctcttcataatcaatccaggattctagccctgacggcaggtcacattcaatgttccacagaagctcttcaatggcttgcaggcgattatattcttcaacggtaatggtaaccattggtgcaaccggttctgccctttttaaccatcatatcgttcatcaggacgtaaaggtcatcacgaacgacagtgtcgttccaaccccatgatttggcttcgtaagctaatgatgaagggagcacatttaaaacttcaataatagttggagcatcaggaccaagttcattggcacaaacttcgtatacatcttggaaatctttaagatttaatgaatatgtcatttaaaatattctcgtagttggtcaaagccaccgatcgaagttccatcaggagcaaacacttgaggcatagtcaatccgacttgtgattcacgtccaagcttaacaagaagctcagcaattttctcatcatcgaacacacctttttctggcataacattaatgaattcaaatggctgtttcttaacagtcagcagtcgtttcgcattgtcgcaataaatgcatttatgaatagtagagtcgtacccgtacactttaaacattatttttcctttcatcgattaaatatgcaacgccaataatacaatacatgtaataaaacctgtgatacagatagaaaccaacaacactgtaccaaagaaccaaatcaagttatctttagtagtttgtttgatatccatctcacgaatttctatagctatcgtatcacctttattcagaagcgtataaaacgacggtgatacatgcctgtcaaaaactcgaccttgttcatctttatagactgcaataaattctaatttagaatattttcctgtagattgacctgaaattaattccactacctccacaggaattactttagtttccatgtaagtattctggctgttccaaatgaacggaataatggcaaaaactaaagctgcgataaaacaacgaaggctatatctcattataatgttctctcaaatttgtggaagcatttacggcatttcaatttcaagttatcagtggtccagttaaccagttggacttggatagttccacattctggacatggatgttttgctgccgatttggcagtcattttcacgtcgttcaaccattttcattatttcgttccatgccggaggaacgaactcttcttcaccgtggattttatctcgctgaacaaattcaatctttgaactatcgtcaataaacttaaccaagccatgattagtgctcatatcaatatcctctagaagacgtagtttcattataacacctcaatggcatttcgtaaaccatccgctttcgcattcagaacttttaacgatttagtttgttctgcaatctgggcttcgacttctttcagacgagatttgaggtactcacgttcttctcttaaattatcaactttttctactttaggttctttaataggcttaagtttatacatattagggttcttcagtttaatttgaattcgagaactgaataacattgaaccgttatcttcagtttcgctgaacatttcaacaacatccatagtctgtaacatcatacgaagtttataagacagcgaacgaacggttttgttgtgcttattaatttcttcagctttcatggtaccgagattacgtgagtagtaataaggaacctggatatcaattgataatgatgcgttaccattaccggttggtttgaatactgcagtaacccaatctttaacatgaactttatttgtacgaccatcaccgccagtgaataatttacgagaatgtttaaaaagcatattcacttggttattgaattcacaagcaaatttatcagcaaatttagtttcaggaattgtagataaccaatcagctaaatgagtctttttaacatcgttaataatagtaaattcaaccaaatcggttttagatgtcacagatttaataaagctcggtttcataaagtttttaatgttatcgcgagctacagtagaagataataaacgagaacgtttgaaccattgaagcagcgtccctaatgaatgagaatatgcattttgagtatctttacagatatgattttcttggccggtatatgtaccaaaattcgcgaagaataccacttactacatctcggtgtggaacatcaaatcctaatgaaccagaagcacgttgggcatgaacattagcgataagacctgcaaaataatcaatgtaatgtgaacgtgtcataatattttcctctcgttaagatagattcattatactctaaccatccttggttgtaaactgatttatgattttaatgcattcattgcgttaaaaagtttagagtactgcaactggagattggtaactacttgttgagcatcacgaagcttagcttgtgctttgtcaagttcaacagacagttggtccatagtggccttgatttgattgtaatggtaatcttcggccggaagaaggtcattagaaacatttagttttactgcagacagtttgcacacatttggcaaacctttaaacattgatttacccgaagtagaataagcacttaagacttcggcctgttcaattggggtcccagtaagcgatgcttcaaacaatggcattttccttttaagattttgatagtattcagagtctttgtgccaccatggcgcaggaaccttttaccaatagatacacgagcctggatagcgatatggcccttattcttaatagggttgataatattaagctcacgagaataaatcgctttaatctggtggatattatcacctaaaacttccaacgcttggtggaatacacgagcaacgttatcattcttaggtttatacgtaagagtgaactcattctcactgataaccatgatttctaacttatcgtaagtatatttcaaatgtttcatgttaattgcttgaggacgaatacgagaagcaatggccatcagattgttaaggttatttcggaactgtttagcgaaatattgtccttcaccgccgatacaaaaattacgaagtttctgtttggctaataaacggctgaactcaccatttttaatgaactctttaacgggtgtgttagtaacgcattcaaattgagtaaacttacgagaagtaatcccataatatgaacagatttcctcaatctcttcaggagtctttacaggcatacggataggattaggtcctggagtatatgcgttcgaggtaaattctttgataagttctctacgtgtaataaaagccattttatattcctcatgttgaaaaatttattatactccaaccatccttggttgtacatcattccttaagaagttttactacttgaataagattagctcgttctgttttatttttaccatttaagcctgctaatcgtgagatttcatcgtcagtctgttgaatagttacattaagttcgttaatcaaagcttcaaagtatttgatttgctcagcatgttttgattcaaatttctgaaccggaataacgtcttggtttagttcgtcaataaggtctttaagagcatcttcttggttgatatcgtattcaacttcttttatttcttcaactagctcgtctttatatctaacgtcttttagtcctgtcctggtgctggtcctgaaatctcttctttaagagtacaaacatacccaatacggtatccagtgtcgtctcgcttgatatcaacttcgtcgataaatccacaatgtttgagaccagagccgattaggtcaaaatatccttgacgacgtccttcaaacgttacacgaactactaagacagttttgcctgcaatcttttgaagctcacatttataaaagtcagttgaacctgaataacgtggatgagttttaaagttcatctgtcgatctaggcccatttgtaaacgtgctgttacggccataaaacgtgtttggttctcgttaagatgagcaacaatccatttcaaaggcattttacactgttcacgaccgaacaaatcagtacgtcctagattacgcaggatgttgttagagttaatcatcgacagaacgttaagtttattcagcgcgctgaagattccatcagccattgattttccgtagcctttacacgctttaataaagcgctcgcggtagattagtatagatttcagacggcatatgaaaatcaaatttactaaccagtaattgatgaacttggatagcaattcgttcataattaagcgctctgcgatcattatggtctttaaaccacactttaatctgtgaagcacataaaccgttaatttcatgttttatcgcatcagatgtaatgctcataactatttcctcagattgaattggaactcaaaaccattataacccgtccttgggtaaagcgtttatgcgtgaaccgtctttaaacgttcttcaaatttccgaagagtactaatacgttctgctttctgttttgtatagtttgcaatacgttctgaagtgagagcgtatcgttcgtttactgtttctttcatgaagtcagggatttcacgagaagctttaatttcatcaaacttatcgagtactgcctggtcttcagcgattaaattttcgtacatctcgatatctttcttaatgaagtcgatattcttcctgtgttactttggataaacgagatgctttatcccttttgtactgctcgttagtttcacgagaccagaataatgtacgttttttgttagtgtttttgtagacttccacaattccaactgaatcgatgataacaatccaattccagcgagatttgaaaatctgacctccatccacggtaatctcattaccataagcaacgtcattaaagaacttgctttgtgcttcagatttaaatttaccgtcgttataatttaccaggttgaaaatatctttagcgttcatgttttacctccagtagttgataggtctataataacataatcatagaccttgtaaacaactaaaagaaactttttcggtatttttccactgaaccaaaccgacttcgggatttttgtaatttttcagatttaagtttctcttcctgttctttcttatatacacccttgtcgtactggagcatctctatggcattcttttgcaaacgatctaagggtaattaaggctttagtttttcctttcaaggaagagtcctggcgaacctcctcgctatattgcattgtagaactaaccatacgatgagcatagagttcgactgctgctttgattttttgcataaaatccataacatatcctctttgatttgtacatcattatttttaaatatttctatgccctcagtaggttcctggtgtccttctttgaggtaagccatatgattattcatctttatggcttttgttacctcagaacttcctataagcttatttcagtaaagttacttcggagatttcctcccaaccatctttatcagttgaaataaaatctgctacataaagagccgtacgtaatgatacattgcgaagacgagatacgttagccttcatccaggacaatgctttgtacgtttcagcatcagtcagaccacgtttctgcatcatgtcagtagataatattacatcttcaactcgaaccataatctcttcattagagtgtactccaaggtcgagatacactgaacgagatactaaagcttgaaggtgtggagcaagtttcgaaccacgttctaactctttatcgatatcaacgtttgtaatgaaaacgatagtaccttcaaactcaaattctttatcaatacccttatcatcaagataagatgacgcagtgctccaacaaactttgcgtttatctccggtatctaatgctgctttaagaaggttcaagatatccatatcagagaatacatcaacatcgtcgattaagagaacgctgtctgcatcacggttgagccaaagttgttcgtaaaggccaataccagagattttaccattaatgcttttgtatttgatgaagccattatcattagcactattaagtgctttatccagagaatacgtcttaccaataccggctgcacctgaaataatgagtgaacgaattttgccatcgataatgccattcgtcatcatgttcattactttaaagcgtttgttgatgcgagttttcatatcttcagtgctttcaacaactgcaactggtgatgtctcaactccttccattacgatgtctgatttgaagacccatactccacgttcagaaccatcaatcataacgaaaattttaccatcacctaagtgggaacattcaggattaagctttgctgggaaccaggtctttgtggcgacataagaaccagagatttcgttattacgatagataccttttttgatttgaacgttgaacattttattctccaatttactcatttcgtttcgataggtctataataacatatcctaaaagcatgtacactactttttaaaaatattttaacccctaaagggacccgaaggtccccacatttacttatcgcacttagcaacataattaggcatatcacagaatacggagcgagtaactactcgaccctttgaccatgcttcagttgcttgtccggcagtgctattaatatagcttgatttgatattctcaataccctgagaatgtgatgcatttaccgaaccgttggaaggcccagaagactggttaccaccagctcctgcactaccgctggctgcacccgtggtagcaccaacagagaacgccatcattactgcgaataaaccaattactaattttttcatatttacctcaagtgaatggttatttatctatttatagtaagaattatgattttcgagatagacttgctcaaggaaatcatcccagaaactcatatctactttttgttgcataccgttcttagcggcttgttctgatgcttgttcaacttggtcaacgatatcttctaggaattcttgtacagttttaaacgtatgtttaccaagcttaacatcaagaataaatggagcatcctgaagcgggtaaaccaggtcaccggttttgtaaatttccaataattgaagtccaccacgacatgcatgactcaatgctttccagtcaataccttcgttggcttccgccttacgagcatcatcgttcaccatagttctcttccagtttaaccaggatggcattgaactctttattggttaacgtgtcttggaatttacggtctaatagattatagaatgtttgcttacctgttttctcgttttcggtttcaacccatgaagcaaattcacctacaggcagaacattcttcatatgtgataaacgaattaccgcaccattatcaaagtattgtccccattcattagaacgtttaagggcttgacgaagaacagccagtcgagaacccttgacaccatatttagaagcttgcttacggacataccctaaataagatttcatgttagtggtatagaaacgagacctgttatcttgaatatacttccatacatcaggcaaatcagatttaactactagacttggtggggtgtgaagcatatctaatgcgacggtttcaccatctgcagctagtttaaagaaatatttgagactatacaactcgtggtccacgtcgtcttttgtgttcttagaagcagtgttgttagtgttcttgctcatgtgttctttaacgttaccggtcaagatatcacgagcatgagggacataaatttctttaaaatcgacgtcagattcaggagtagacgttccataaaggtggctaccaaagtagcctttcataattgttttcatcatttagccttatattcaagagtaggacagactttttctttacgagctttaaggtattcacctattaatgatttcttacgttcaataggctcaagtccatttttaattcgttcttggttttgtgcaatgagctcaatttctttataatattttctgtcgttatatttgtctaataaccaagatggaccaattaccgccccgacagcaataagaaccattactgatattgttaaaatgcctataccaattgaagcaggaactaatgtccataaactactaaagacaaagaatttagttaaaatttcttggccaatgattgcggcacctgctaaagtttgcaaatccaacaattgaaacagccaataccggaataaacgttttccaaaaataagcacataatgttttcggacgattccacgtactattgaacgtggcataaattttaaagtgccaagagttttcattgataatcataataattccttatttcaaagtcgggataatagaatcgagataagctttaagagcaactgcttcatctttgtctaatgtaatgatatgttgacgaaggtcatcaatttggcgaataactacaacatcaccgtcttcataagaaggattaacgctcaggactgttgtatagtcagggttgtcctgatttgtaataaaagcattacgacatttagcccattgaagtttggccttttggctgtttcagattccatgaattctttcactttagcgacgaatgttttccaattattaatagaaaaacattcgtcttctgtttcgatattaaccccactataaagtccgtgataaaaacgaacttgaaggtcttcatcaatgttaattacagatgcatggcctggtggattgagtttcaaaatcttgtccagttccataggaagaatagtaacagcatcatcttcttgcgtcagaacgtaagcataaccgcgtttttcaatacataaatcaccgaacaactctgttgtttcaattacagttttcatattattcaccaattaaagtttcaacaaaattcaccaaagcattctggcaagcgtcaacctgattttcataaaagtctacgttatcatttaccgcatgataagctacatcattcaaatctgaatcggcttcacgtaagtcatggataaggtccatcaatttattagcttgttcacgggtcattttaccatactcgtttcaataagattcactatgccgtttaccatgttataagtaaacatcggataattgtattgtactacaacataagcgataagcaaaagtttcattttgttctccgttcgttttgataggactactatacacatatagtcctatcaagttgtaaactaccgattgtgttttaaatgttgataaagttcttcaacttgtttagggtccaaaacaattaagtcattttcttgacgaagataaatccatcccttatccccagggccatttttacaaaacatcaccgtcgtcatatcgtcatcttcagcgctttcaggtaaaagttcaagtacaccgtcttcagattttccagtataatcgtaaagcataatatcctcacataatctcgttaacatacatttgcaattcggtgtgcgtatcagccatctttttcatagctctgttaatgtcgatgtctccatcttcgcaaccatgagcattttcccaatcagataccgcattagcgtactcttcaatcaaaaacattaacttagaaatttttctttacgtgtcataatgttctcctctagtaagtaaagactactataacacaacctgaggaaaagtaaactgctaaatgccaaaaagccccaaccttttcggaaggggctattaaattagatagatgtaggctctaattttattttcatgaactcagcaaattgtctggcggtttttatgccttgttcatgacattcaaatgcatcatcacagggactatttttgtaatgctttgccatatacttatagaatttttcagaattctcgacattttgaatttcaaacaaagtatatacgtttttaatccctgattccataaagttatcaaaatatgggtcgatatgtgcagtaccaacgataggagttgttgctgcaaaaaccccagcatcgctatgacagctatcgctcttaaggccatataggcctcctgttaattttggccagtatttatttttcgcctttggacggccttaacatctgtgaggtatttttccagcttgcgcttgcgtgtataatcagctttagaaccagtttgacggatatcctcatttaaatgagaaatagaatgtcctaattctcttcggatttcatccaatgttgggttacagtaagattacgaagttgtctttcgtttaattgctgcatatatacctcttggttagatattagtatttataacaaccctgtcaaatcattccaatgcttccggcataatgacacgtatctatcagtatcaccaatttcaatttgactgccatctgtaattggaagtccgtcttccgtgactctagctaccattgtggcctttttaccacaatgacagacacctttaagttcaacaagcttatcggcaatagccattaatgcttgagaaccttcaaatagattacctttaaaatctgttcgtagtccatatgccattactggcacattgtatacgtcaacaatacgactaagttgatacaccttttcagtagttaagaactgagcttcgtcaacaaatacacaatgaatatccttttgtgctgcagcccatttatagaattcaaagatgtccatgtcttttgtaattatattggcatcctgacgaataccaatacgagagactatttcaccttttgaatcacgagtatcaatagccggtttaagaactaatacacccatgccacgttctttatagttatgtgcggcagtaagtaatgaagcagacttaccagcattcatagcggcatatgtaaaaattaaactagccataagagtcccttatagtgaattcacgtagtcaatgagttcttgttctttcctgtcaaatgattccatcaatgcgtgatattcttcgtccgtcaaaggagcatattcatcgtacgcattggtggctgcttgttcatccaataggtcatggataagttcgaacagtttagctttctcttctttagtcaatttcatttaggttcaccttctttaacgaaatctgggtaagggtaaaatcctgagtaaaacccttcacctttatgattactacaacctttgttcgaacagtaacaccaataatcaaaatcacaagccatttcgtcattgcataaagcaaaaactacaggccattcgcatttttcgcatttagcgcctgtaagaatttttgtttggctcataaccatgtcacctttaagcagtattcttctacatgctgtttacgacctttcttatcaataaaggtatattcaacgaatgttccaatgtagtctttatctacatcatgtggactattaattggacatttagtacgacaaatgcgttcccattgacgaataattactgccttattctttgggtcgtatggatgtggataatgtatattcataataatggttcccaatcaacaatcacaatttctagtttagtggaatacgtatctaaaatctcttcgatgatatcccagtttccgccaccgataccagcaccaattcttggcatataaattaaaggctttgttatcttattctttccgaatttatttaattctattatacaattcattaaagcagagtactcaaaattaggtccaggctcaaactgtgtataaagattaaagcaataagcttttatgggtcttaaaatatttttcataaaccgaataagtcccgagtttagattcgtctccgaattcggtttgaagtttatcggcttccagaatttttggataagcctttgctaattgacctgctacaccagcgcccattgtatgaaaacaattgcacccatgagcaatattattacctttagaaaacagggcgacaatatcgcccttgatatagtttttaatcacttgctgcaagtcctctagtataagagtcaactagacggtccaccatagaattgcatgctgccttatctttaggttccgccaccgagcattctaatatttgccattttttatagtatcttttaattaaggtagacgccttgaacctactagacgccccatctttttctccgtctttatacgcatataacaatttttgtgaaaaatctactttacactcttgacttttaccacaataatcagacgccgttctgtttgtatactccgttacatcagtatatgtagtattagcaagagcgttaaatgaaaccaagccaactattaaagctaacattttggtcattcttttatttccagtagtttatttgatttaaggtaattagccttttctaggacttcagaagcatatttacttccagcacttgtcttccatcccgcattatatgaggatatagcttttcttatatccccgttatgtatatttaaccaataagaaaattcgatataagcccatctggctgaattagaccgcttagatagcattttcttaatttgggcatcagtcatattataaccaagctggttaattcttgccctcattgttggtagatagttttggaacattccatacgcatggtgacctttcttatctttaagattaatacctgcggatgattcttgccatagtattgcggccattatgtatccaagtcctttcttatgcatattttcatgcgttttaaattttccgtccttagaaaactgttccccaaactgataaagcataattcaagttatcgagttggacattactaaaagtatgctcggagctatgtgctgataacgaaagagcaaatagaccagcgagtagtgcttttctcatgtttacctctagattttaatcactgctttagaagcttttcctggtagtcgtttactgttaataatagccattctgcattgaagagtcttcattttgaatgctggattttcgcgacagactgtaagtcctaaccaaagatttccgtcagttatttctaaacggcctgggcgatattcgacaccttcgacaaaatcttcatcaacatctggacgtgccggcattgataaaaattctgcaacttctttaacatgatttttactttatgaaataattcaaaaacgtaattctcatctatttctctctggatggcacgatctaagagatgttgagaatacttgatatgaaagcctggtagtccaagagactttgcagcatcttttataccggcatttattttgcggaactccgtttcaaagattcgacggagtttattacggcggataaaaacgtcagaattgatagtcatttttgatttctcctctagttgacaggtctatagtaacacatctagaggagaagtaaactactttattgataaaatggagttaaagcccaagattctttagataccatattggcgaaatgcctcatctcttcgatttggcgacgacgctggtcagcatagtcttcttcaccttcttccttacaatcttcaaggtcttcttcaagatactttaagtattcactacaaattttgttgaccttttcttgaaagtccaataacccggtaatagtagaagccattagtatttttcctcaggtcgaaatactgcacgacatgcccacatactggcttcttttagatgttgcttagcatacttaagagcctgcactgcatccatatcttctttggtttgttgctctgattcattttctttcaagatatatgcttcttcaatcagagcatcaaacatcaatccaagacggacttcggcgtctttaatagcgttcactttactgattttatcatcggtatgcggcttgtagcctttgatgtcttcaatcgacataaggaatttcctcatcggtggcaaggtcatattcgaccaattggataggctcattaataccatatccacgtacagtgatatcggttgacggatattttccagtaatatcacccgttctaaatgcttcaatgaatgattgctcgcctgagcaactaaaccaggcggcaaaacattttaaaacatcttcagacccttctataatcaatttagccattataaactctcagtaaaggtacgagcgataacgtcgcgctgctgttccggagtcagagagttaaagcgaactgcataaccggatacacgaatggtcagctgtggatatttttccggatgcttaactgcatcttccagagtttcacgacgcagaacgttaacgttcaggtgctgaccaccttcaattttaactttaggttgatgttcaatttcaatttcacgagcattcaaaccgtagaaaatttctgggtctacaatagcgtcttctttaaaagtcttagagacaataatccgggcttgagtaccgtcttcaaaataaatagtgcctttatgttcaccttcaagaatttgatatgctttcatataacctcaattagaaaataaatttatccaagatttttctttaatcaaaaatgggtcggaattaaacgccattaaactttgagtgattaatcccttaaatggcccatcaataaattccattttgaaatgcggaatactagtcatcaaccgtgcattaggagcagtacaaagaacctgctgacctgcgaacggacctttagtcaaacgatatcgtttaggtttaaaatggtagatctcgtaattttctacaagagcccttttattgcatactggactgttataacaatactcaaaaacttcaatagtggtcaatcattgcattccaatcacaaaaattgaggacgagcagtaccgcctatgcaatatttgcttttgcagcagtgctgtactgatttaatatggacattgtaaatcttatccatatcaggagctttaataggctcgtcaattatgtatagaatacgagaaagcgttaatccacggaatttagaaccttcattgccaataaaactacggacagaatcagtaaataaacggaatcgaatatcatcgctagaataacgagaaaattctttttaatgttgccagcagaaattttagcataagctgaagtattagaaagaacaataactgttccatcgtcgtgcagccaattagcagcaaaattagttactgcagtggatttacctgattgtctgccaccgtctaaacgaagtgtacagtactgcttgagtatgtcttcaaatggtgggacataaccattcttacaaatttcttctactctagcatcagaatggtgtgtaaaagcattcatcatcagggatagataaggtccagttaaaaatgttttcattttgttctctctaagtttgggccattccatggcacatgaattgtccatttctgtatttacccattaccgcacttgggctcgaccttattacaggttggcgggaatccctcatagaatcatgaggtccagcttgttcccatgttatttgaatgtaaatatttttgccttaatacttataccagtgtggcttcattaaaattttttcatcgagtcattttacctctccaagtaattatgattatactatcacaattctaggagaaagtaaactgttatttacctttaattactttagctgcttcgatagccgcttgctgaaggtcatccatagacataccgaatttagaagcaaagttatcaattttcttttcaacagcattcaaaggcttggcctgtttaccttcattagcgccaggaagagcgagaatacgctctttgtcaatataaaggcttacaagtttcttacggtctttatcggacaaatcgtgaaatgaatgggcctttttatttatagcggcttctaatttacctgcactcactcgcgcttcagtaataaattcttgatatgttttcatttttgtttccttgtttgttttgatagagtaattataccatattaatacttaagcgtaaactgtttaagctttaccatcgcaacctttttccttagtaaattgatttaccatagtatttgtaccaagtaggacgttgagcaattttttcatctaaacgagcttgacttatcgcaatggacgcttcggtcgggacataattattacgaaattcggcagggatgtcggaaatatcttggacagtcgtgtccttgattttgaaaccacgtttcaagcattcagcgattagctcgatttgacgtaaacgtaaaaattcgagtttgtcgtaaaagaatgttacatgacctgtgcctaagataaatgtcggggagattttaaaatcctttacacgtttaccgttttgaacatgtttacggactgcaccaaatatgcgtggtaattcacgatactcagccataagatgttggtcggtcagttcagaaacaagtgttaaattgatacgagtcataatttcctccaagtagttgatgaatgtatagtatcaaaacccttggaggaagtaaacactatttttctgaagcgcctgaaatatatttttcaagacgttgtttcatcagcgagccgttcttagcgatttcttccggtttatcacacatacgcaacaaggcttcaagcttaacgatatcactggtgcgctcaaatttgcgagtatctatcttactagcaagttcagaaatacgtgctaatagactttcagcttcaaccaaagctgcacctagcttagttgcaaatgtgtcagtagcttcgttaagaatagattctgataaaaattcactatatgttttcatatatacgctttccaagttcctgttttaaatgttgagattacgcgtttcgcgcgattaggtgtctgacgataccatttagattgggctagatttactgccgcttcatcccaacgtttctgttgaagcatacgaagagaattagtaaaaccggcgacgcctgctactcccatttggaagaccatattgaccaatgcacatcgacgaaccgcgtctaaagaatcatacaccggtttaagtttagcattacccaagattccgcgaacggctttatcaacatcttcattaaatagcttttcagcctcatcaagggtaattgtaccgttacatttacggccgaccattctgtcaagttcagctttagctacggctaaagacgggttctttgttaccaaatggcctatgccaatagtccaaaagccttcggtgtctttgtataaagacagtctaagaccttcgtcattacgaagcatttcaaatatattcataatacctcccacgtttataggaggtatttattacttataggagggtagtgagcaccttatataatgatttgcccattacatattcccattgagaaggtttaattaaagcgaatgcatcaaattcaggaatctgacgtccgtctgggaatgtatgataggaattacaaacactgtttctgaattgctcgtgctctacagggatggtatataggaacagatgaatattcttattgtctgagtaatgatgttcacctaggtctttcaggaaggcagggtcatattgtgtaaacccagtttcttcttcgcattcacgaatagcggcttcaataggagattcgccaggttcgacacggcctttaggaatatcccaccgatgagctaaagaacctttaggacgagaaccagttacacgtcccatgaataattctttatcttttgtcatgaagataataccggctgatagttctttcactttatttttcttactcatcatctcggtcccatgatttggccattaattcggacataaattcttcaatacgcgtttctttagatgggactttcactattagagaccgcgagtttgtaatctgcaataggacggaacaaatcaaggtccatattaagatcgtctttgattttttcttctgacacatctttatcatatgtgtacagataactatcacacgattctgatttaatgtaaattgctatactcatctcaaattcctgcattcagttataaaacgttcaacttcattattcttggcctttatcttgtctttacgttcctgtaaactacttttaacaagattaataatgatggcggcggtaccgccgccaatgatgccaccaacaacacttatgatactagatgctaataagatagcaataatatcaacaaaaccgaaagaactaaccttagtactaaaaaaccataccgacggtacaaatataatccatcctgttatccattggcacttattgaaaaacttttcaagctcagcttgagttgttcgtattacttcatcgataggttgatatccattaatgtatcctgttcacgataatacctgctggctggtcgattttaaattcttgacaaatacgtttcactaagtaggatggacatcctgtccaatccactgaatagtacgaaataccttcattgtcatcgtcaatattagaccaatatgttttgttaatcattaccagccttccatagggaattccagataaacttgggcattgacacgaatttcattggtaatctttttaactcggtctgtattacgagatacacgtccgaaccaacgccatccattactaattgcacgagaaccagtgtgccatgtttgccaatcgaactgaagaagagtacggtctggagcttcccatttctctagttcacctttttcaattttttcgaggacttctttgtgccattggcgatagataagttcgccatcaggaatctggctgaactctgcagttcctgttgcaaaatgagtaggacacacatcagcgttaacaaggccaagaatatgttcagacaaatagcgaggattgtcatagtcgggttgtcctgcagtaataaagtgttgaccaaccggaatatccgggcgtggtacatcgtcatggtgataacctgggatagcagggtaccaaccaggcatcagcatgtggactcgtgaatcaaatacaacctggtcggtgttccaatcatctggcaagttcataatgaagctgcgagtaataggaccgccgttattataagcaaattctaaactacagttgaagaacataggctcgttcttgattttatcattagaaataccgccggcaaaaccacctactgcacgagcttgactattaaacactttagaactattcatattattttcctcgacattctttaatgaaattttctagattggtagattcaatagctttttacgagcttctgagtgttcttcttctgacaatttacgtttataattgacccagacattatggtcgaaaccagtcgtggcatataataacaatgctccaacgaatagcaaaaacggcgataagaatacaaaaccaggaacaccatccatatcgtaagccttttgtaatactgcaacagaaagagttacgtaaaaaggtgatgcaagtattgttaaaagaccaattcggttggtttctgttaatttcataatattctcctcatgttttaataggactactataatatagccctatcagtttgtacacttattttgacatttcttcgatgtcacgacgatacccatcacgaacttcacgaagagcttcaaggccacacataggctcgataccagtaatgtgaacttgattaatctgatactctacatcttctaactgagcgaaaacataacgacgttctgctgcacaaccaggtttagctttaccgaaacgtttattcaaagtagtcatttttatatctccattcactcatttgttttgataggtctatagtatcaacaactacagaccttgtaaacagttttgtgaaattatttgaaaggttttaccatatggaaattttgtttgaaacgttttacgtaatcgtcatgtcctaagctttggtacatacttactactttgctgtagttttcccaggcgtattcacggaaccaaccggaggtgatgcttgtgcagactttttctaatgccatcatgaaactggcttcagggttaatttcaaagttattaggaatctgagaacgttctaatgctagtacacatgattcttcgtatacaccggccaatttgaccatttctggtaatgattcgaacttctcgcgtgaggtcatgacttcagaaccatctttcatgtaaaacgtataagcagggcggtctgttagtgcaatggcttcgtgaatagtatcatggtcatatgtatagatgtcatctttaaagaatgcgcttttagaagtgtcaagaaccgggtgagcatagttcaaggtttctttctggcgtttcagcataatttcagtaagttcatcgttcagtgtaacacctttaccacgaaagatactgaatatggttcatagtctttaaaaagaatggattatttttcttgaaacgatgggacatcttaattgcaagacacatctcaggagttgcccagtaaaacccgttcaaacggtctttagtcaaatttttcttggcatattttaaaaggtcataagaagacgtgaaatcttcaggagtgagttcaccgactaattcacggacattagtgattgccggaacaatatatgcttcaaaatgagtttcgcgtccattatggaagcatttgaaaacttggacatcagggttatcttggtggacatatacacccatcatttgatttttgaatgcattccaagaaccttggtctgcaataaagtcccagtcactatttttgatagcgttagaatcaataagtccgtgatagtgaagtgcacgagaaccaataactaacatcataatattttcctcggattaattaacttaaatttcgcgacatgcgatattatattcatcccagaggtcgtcatgtgaagcctctaccaatggaacgattgtaccgtttatgtcttcattataaggacaaattgtacagtgcgcatcttcgaatcggatgcctttgtgttcagatttttataacgcatatcgaatatctttgcaaacttttcacgagtaatggttttagcaaccactttagttccgatactttcgtaataaatcattgtggactccatttaatttgataggactactataacatagccctatcttgttgtaaactgttttagcaagaataactagatgatacccagccttgaacagtaatactattatttgataccgagattgcgttctggagattcagacctgcgttatcttcaatccataatgtaacttcttcgcgttcttctgttgcaatttggaacaggttttccagggcagctactgccgtacgtacagcacaatctaattcacgagacatatgatttccttagcaagtgtgagaagatgcaacccacaaccaccagtttcgaggctcaggttatagtcgtattggtaaacgtcggcccattcagcatagccgttttttgtacaacgttcaagatcggctttaagatgtcctggcgaatgataggttccacccataccataagctggatacaagtcgaatgttgtgttttgtttatcagcaatttctttggcagcctcaatagctgcatagatttttgctacggcttcagccagttcggtttgttctttagacataatgattccttagcacaacgcagaagacgaaacccaagcaccttcagtaataacgtaaccattaccttcacgcttaacatcgccaccattattttcaatttcatttttcatccattgggatacgatttcacccttaggataataagtacgaccgctaccataatcacctacagaaaatgatacggcatattggtctgcgatctttgttgcttcttcttcgatacgttcagcttgattcagaagtttataaattgcatctgaagcggatttggcatcattaaactctggtactttaatttcaataatcttactcattttctacattccttaataaagttttctattgtttcattttcacgtctagctaggagttcattataactaatcatttgagaagcgtaaacctttttatttttcttgttatggtttataaaatcgtagtaaaaatagactacagtacaaaaggatgcgatggatgcaaaggcttgggtgtaccgtaagtcctgccattggtctgtgaatccaccggtgttccctataaatcctaacacaaccccgtcaataagaaatccaactaatccaaaggcaaatcccatgccaatactcataataaaaattagaatgttctcaccaagagacggccatacggttaagagttgaggcttttgcatcttatttccttaacgaattccatagcttcttcatattcatactttttaacagcttcgtcatactgagcttgggcttttgcgcaccctgaactttccactcacgaactcgagctctgtgatgacgtccttggtaccaatatcccacccagttaataggcattaataaaaacggtacaataagtggtgcgacgaacattaatgaaaatgctgcatcagacgatataacttcactagaatctaaaacagctcctataatcataaagattaaaaatgctaaagccaaaatagggccaaatagtacttcgtttgggattaatttacgtttgtattcgtatgcccagggcttactcggcatgtatagggttggctttgacatattctctacattccataataaattgctcaaggattaaattgttagtgaaattaggactaacaaccatagtttcataaagcgcatcaatagcacttaaagcatcaactcttttaagcaaaggcttgccttcatacatagtttcagaatcgacgattaacgtaaagtaatatttttattatcgactagaacttctgtgtcaatataaaacatattagacctcagaagcttatctctaaaaccgtaataatcttctgaacgttcactgatatattcccattcagtgtttaaacaacaaacagaccacgtaggagcaacgaaatcagtgaatctaatatcatggtctgcaactagtttagcaatagctccgatatcatgaatcataatacctggggctaataaagattttctgctatggctagccgttttctcggtggtctcataagaagacgaccagtaccatttacgtccagttgcaacatatcgtaatgaatcaactaaagacgtaggtggatttaccttatctcggaactcttcgaacattgagtcaatatcattattttggtttcgcatgttaactcctttattatccaaaaggaggaccggagtcctccgtattattttatttcaaagagttaatatattcttgtacatcggcagaagtggtttcgacaccggctggagtaccattgaacgtttcaacacgagtcagagtgtcttcgatatcaaccttagtcagtgcagcaatttcaatcacatcatcagccgtagagataccaagggcattggctgctcgagtttcacgaatgtattcgagtttgattgccagattctgacgagcatcatcaagttcaaccaccttacgagcaatttcaattcgcatagcggcatacccgtcagcttttgtattaagttgttcggcagttcgacgatacaaaagaccaagcttagcatgcatggtaacatcttgtccttcagccaggagcttacgaatttcacgttccttagaagcggcttgcttattcttttcaataacaagttcgcgaatacgtttttcttcattaatagatttaacagaagccgtttttagttctttgatttgggtaatcaacttatctgcagctgcgttatactgttcttcgacagtcagatttttagccatagcagtacccagtttagtgcggatgaattcaacaagtttcttcagtgtgttttcatattattacctttcaattggtggtttattatccaacgagagtattatactctgctctaaagagtttgtacacttatttgtacgaattaataatctcttccattttatccagaacatggatatcgattatacgaggaagtgccgaaagattagaaccgtcgaaagatttaaggtcttccaaaataatattttcaatggcctttaaagcttccgcagattctgacgcagaattaaattcaggaatttctccaaaagacgtaagaatgaaccaaagtattctgcggcgatttctttagcttgttcgatatcagacttaaacattttgttttcctcatttgttggtggagtaatcatatcaccatccttggcgtttgtacattattttttaatcaagttgacataaaattctgcatcttcagggtgcatgccttcacagtattcttcaaccatgaacttcttaacagcttcataaggaccactcagattaagctcagttggtccagaacttggaatcttggaccgaatcgatacgaacgtcagggtgacggttgcgaataacttcttcggtgtattcataatcaacgacatcaatactaactgtagccattttgttttcctcttgatttgatgtgattactataacataaacttacttagatgtaaattatttcaacgtcacctttagcggctttataaccttcagcccaagatacaacagagtttttatctgaggattcaaattcaggcattggactttcaccaatattcacacagtatgtttcttcattttcatcgaaccaaataattaaagtagtcattttgtttactcctttgtagttgataagtctatagtatcaccatccttggtgcttgtacatcattattttaatttttccaacttaacaacttgtagtatccttcattcgtacgtggtttatcccaaaaaatactaatatatgattcgctgtcaatagaagtcgccgggtttttctctaccgtgtaagaccttcactttccagccattcaatagtatttgcgcataaatcagaagaacacctcatcgggaaccggcaagatttttcacctttagctgcagtgttatacatcttttctaaaatacgcttttgcacgtttttaaaaatagtttcagcagattcttcagattttttattcagttcagtgtaaagactcatactattctcctcatgttttaataggactatagtaacacatccagggaagaagtaaacaactttttcagtaagttatagaccccctaaaggggcccgaaggtccccattctttacttacgagtttttgcatactgagcagcgtcagcagccaaacgacctgcctgacgaagtttttctttaatcgcatcgtgaagtggttgagtatacttcaaaccttcgatagtcaaataaagacgataaaggtctggggtatcaaggttgttgatatgttggccattacgaagactgttgaattcacgaacgagtaagaagatgtatcggattcaatatcacgaacaagcgaagatagttgtttatatttttttccaggctagaagtatcaaacttaagagcaggagctttaggagttgcttttacttccggcttaggctcaggttttgctttaggggccgcaggtttaggaacggtaggagcaggttttactttaggcgaacccgatttagcagaaacaccaccactaacaatatctttgaatgctttagaagctctgtaatattctttttgggtggaagtgtcgataccgtacatggcttgaacgttttgaaaaactctgtactagtttttgtaccagaaatagcatcgtaagcagcttgccatttctcttttgtcatacgtacaccggcttcggtgattacttccgtttcggctaaaaattcattaaaagtatacattgatggtccttagaaagtgggtttattgtttactatatttatacaaaaaagccccaacctttcggaaggggctatataccttgtcggggtttccacctactaaggcaagtgtttgtacgaaacgccgggattcgaacccggttattaagcagttgacgctactcaatatttttaaaaggccatatctcgaccatatccgaacgttccgtcaaaaacgctactcggcttacggcaaagatatttcctcgaatcgataattctgtgcgccgtttctgctgtgatgtaaggggatattaacgaatcataaagatttattaagaccagtccttactcagggaacatcagtccgacgacttgccggtagcgacccggcttcttattttgacatatcatcaatttgttctctacgtctacgccatagattaattacttcatcaacacattcggcgtttgatatatgacggcaataatataatgattcgcgtttctggaaccgatgttgcaatgggatttcgtttaaaaggtctttacggtcaaagtattcaaaactagttaacccagaacggtttttaaggaaacttccaatgaccaaattcattttgaacatagacgtaatcggcatgctgatacagcgaattaattaacctatcggaaataactgtttcacgttcgttaaaataaaacgttaaatcatgaactaccagataaacattgcctttcatattttcctcacttaaagttggtcgagacagaaggattctaaccttcaacctacggattagaagtccgttgctctatacaattgagctatgcctcgaatatatgacccagaccagattcgaactggtaacctttcccttatgaggggactgctgctaaccattgagctacagggcctaaataactttctattatgaaaggcactttagagcacctttggtaatagaggatatgaattaataataacacataattcttaaagcaaatcaaccattttaacggtcggcaaaacgatttcttcttcaatataagcaaattcgacacgttcaactacacgcaagaaatcgtaatcgtagtattattcagaagcgtagccaagaatatcaataagaccttgagatatctcatcgcctttcacaaagaacaggtcgaatacacgtgattcatcttcttcagatttattaccgaggtcgacttcgataccaaagaccttttaatgaattccggataaagctggtctgagaacagtccttcaaccaagtattcatagattaaaagcgagcaatcactgaatggtgtattaccacaataacgttcggctttggtgctagaatgacggctcttaaatttcttcaagagatatttaaactgttggagctcatgctcttccacttcaaacaatgttttggttttatagttgtcaccatcattttcataggtagtgacatcaattacgtaacccttaggaattgtactgcctaaacaaatattcatttactcaccgtaccatattaatgtaattatattcaatgcaacgtaatttcaaaggattcttgaaaatatcatattcaagaggacctttttctgtttcaataaagaaatcaaagttcacactattaaatttgcggtcttcccaaagtaatttaacctgtgaagatgaacggtcgatgtaaaccttttcaacttcaaagtgggtcaaaataccatagtaatcgactagtgctttagctgcagctcggtcgctttcatatccattctcaacggattttaccttagcataaagaatcatgaatgttccaccatttcaaaggtatgagcatcaacaatatgataccagtcaaaattttcttctgcgtttttataaatttcgcgaagagcctcaacagtttttcctgtagcaacaaggtcgtcaataccaccaagaggataacagtcataaccagcaaacagaaggaaattaatagtttctgtaggttctggatgcagaactccgttatcgtctaccacttcaaagaaagtgtaagaaggagtacaagttttaatccaggcccatgcttgagctgctgaatcaaacggattaccggaataaacgacaatccgggtctttagaaggatttgcttcaaaatcagcatatacatgatatttcattttactcaccttttgcaattttatccataacgatagcgattaagccgattagaaatgctactaccaatgagatagaattttctgttgttgtcagtagtccacaaatgaatcctacaaacatcgaaaaactaaaagccattgaagcaattactacagcaacattacgaatcagttcagcgcgtttcattttatttctccatttactcatttgatttgataggactactataacatagtcctatcagcatgtaaactacttatagaagagtttttgcaataattttaagctgagctacagaaatatgcttagctttaaacagtgcagtctcttcagccggagagataacaatagtagcgccatctttcttagcagaccatccatcccctaagtaaacagtaccttttacttcttcaccatcaaccagactaatcattggtttaccctcacgtcctttatttgttttaataacttcagaagtaagggatgcttcggtcagagtagaaacgttagcaacaggtgatataaattctttataggttttcattttatttccttgaggctgtttatttgataggatgatagtaacacaccatcatccttatgtaaactgttttgtgaaaattattttagatcttcggcccaatctagttttaagggttctttgtattcacggtcgagaataaccggaatagctacatcaccactgaatgatagttggccaacgttatatgataacgttatatgtggagtgtagtcgtcgaaatcatgagtagcacctaaagctcgtgcatactgatgacgacatctaagatattcggaatcaagaactaaaaccagtacagcgccgtcgtcagttttccatacctcaaagtgtcctgattcggcaatagaataactaccactagacgtagtatatggtatgtttacacgcgtgaataacaaattgttgaatgaagcttttcacgtggtactggattaggaattcttaatttacgctggaggtcttccagcgcatcaagtgttaattctgaaaacttagctgcgacgtagaggccttgtgaaaagtcctcaaatttcattattcttcttctgtggtttcagctttaacaagttcacgtactgcttctaccaggtcatcgatcttaactgattcgccagtgataccaaccagattagcgattttagcaagagcactaccaagttgctgagattcttgctggatagcagctgcttggtcttgagtatcaagaatgcgggatttcagagtaacgatttcagactgcagtttttcgatagtttcagtagacattttattaccttaagattgtttcaattttagaataaagctcttctaaagagccgtcgtttgtaataactaaatcgccttcttcaataggcaacccagcttctgtaatatgtttatcggtggattctcgtaccagagcgaaccacatgaataactgtagcacccatcgctctagcggtttccatttcatggacttgacgtgtatcggttacgacatagtaatcgaaatcacttccaatataatccatatagtttaatgcaaaaagtttaacccaatacatacggtcaaataaattaacgacaacatccgtaccgagggcttgcataagacggcggattgaccatgtgtcgttgatattatttatagcttcacgcagggcttcatatagtttaatatctagatacgaatatccaccttctaacgatgataatactttaacattattaattggtaaatattgactttgcaaataaattagcgcttcttccaataattcaataacatccaacttattgagatttaatggtgtttcacggtcgtatccaatgccttcaaagtattcgtatttcaactctgtgaatacatcaggattttcagcatgtctacgtccccaggctattgctagagcgtctttaatcggatatgccaattggtattttacggatttaaagtttgaattgatgtaatcagcggtggtgtctttaccactacgtttgatgccgcttaaaagattagctccataagttttcctcatataatttatgagtgattataacatatggagctagaagcgattaacgcaaggaagggtgtctagaaatggatttagattcgacggcttgacgtggttgttgagatacaatgacttcgccatctttttctatcgtcatatacgcgtagtgaatagttgctacgcacgtaacggcagggtcagagtcttcagtgtaactaaattcaatttcactcaaatcagaaatccatggtttatagaaatttgctgtcaaaactacttctgtcttattgttgtttaaaatgtgcaaagtaacaaactcaggaccatcggcatgggctgtattatgacctgttatatagttattagtgctgagcatccatttatacatgttcatcccaggacgtcgtcatgtcttcatcaactataaatcgtacaataaaagggtcatattcaaatgtagtgcctgcgcgcattgcacgtcctaaccccattgtgcctgtcacagtttcaacaacaggaattctcacacctggcagtggtgccgtttgggcattgagcacaaaacctgaagttcgtgcactatccgggatatccacaacaaagtttgttatatttgtttggttaaaaatctgtctcgctggacgagtcataagcacctcaaaaacgctttaataaaaatgcagtataatggttttaggtctcttccattaatccggttcaacagaatatcagaagaacggaagagaatagaattaagatttccaaacagtattcgcagagaaacgttttccttttgacataaattgctgagtaggtaacatgattatgttagcccagtctttaggagctatttctgttattgttcctctaatgtggcctggcaggtatgctttaatcattttgtcagcaccttgaaatcctttcaccttgctccagtctatcttcaactttgtgttattagtaatagtagttgtgctagcatattgcttcagcaattcttcaagaaactgttgacgtgctttaggtgggatatagtgcaagtttaacccatacatcaaattatgtttacctaatcctaaataaataatcaaaggatatctgtcccagtatggcagagtatctttatgtttagcatcatacacgtaagtataaattttgcctggcgtaggcttgactactttatgaccttttacacttttcttaattgtttcaacaaaccacttagatgatttattgtttactgctgcgccttcatttctaatcttttctcgtattgaactgcgaaacgagtttatcatcagaagttgacgttcttgcttattaagtttatttttaggtttagattcaagcgtttcaattttctgtgcagtcttaatagatgatgcatatctagacattcgcagatgtaaacgacgagtattttattccttttgattctgcaaatgcttttgcagtgattccttctctttagctttcttgtattctaatcctatctcaatccattttctttcattcatagactgagcaatcttaggggcttgtacgccttcagatataatttggaatatgctcataattaccccttgtatccgagtttcctaagtccgtcttcggttagaactcgaaattttatatttctcttttcagcaacagctgaggcagctttccatttgtcacagttcacagaccaggtgtatatttcattcatataacgtttctttgccgcggtcgtaagatttgcaggcttaataggtggttgagtttctttctttggttttatttctacaaaaactcttgacctgatgcatctttcatccatatgtccatatagtatcgacgtttcttaccttctgcgttacagaaatatggaattactgctgtttcactaccccatgcaaataatttctggatttttatctaaccattcgaaaaagaatttttcccagtttgaacgatacgttattttggtatggtctccacggtattttttaaatttttcgggacccatttaccagagtaggccatgttgtcctccttataaatagtattatttataccaatttcatattggaaggagactatcttgttatttacattcttcgacccaataggatatagtgctaaaacagttgataagaatgcacctactattcctatgacagacatatttcgtaactataaagagtactttaagcgtgtggctgccaattatagattacgttcttattacattaaaggctctccacgtcctgaagaactagcaaacataatttatggcaacccgcaattatactgggttcttttgatgtgcaacgataactacgacccgtattatggttggattacatctcaggaagcagcgtatcaagcgtctattcagaaatatgcaaatgctggtggagaccaaattctttaccatattaacgagaaccgtgagaaattttacaatttagtttcatatccggatgagcctttagtgtggtatgataaaggtgatgaagctcgtaagtatccacaatataaaggacctttagctgcagtagatacttatgaagcggcagtattagataatgaaaaacttcgtaaaataaaaattgttgcaaaagaagatataaactcgtttattactgatttgattcgtgagatggagattgcataatggaaatgattagcagtagccttaattggttcgtgggtgttgtcgaggacagaatggacccattaaaacaaggacgagttcgagttcgagtcgttggtcttcatccggcacagagagcacaaggtgatgtacaaggtattcctacagaaaaacttccatggatgactgttattcaacctattacgtctgcgtcaatgtcaggtattggtggttctgttacaggtcctgttgaaggaactcgagtatatggtcatttcttagacaaatggaaaacaaacgggattgtacttggtacatacggcgggattgtacgtgaaaagcctaatagacttgaaggtttttctgaccctacaggtcaatatccacgacgtttaggtaatgatacgaacgtattaaaccaaggtggtgaagctggttattattcaaactctaacgtaattcaagataacaacttggattatggtataaacccagatgatacagatttagcaaatattccagaagatgacgaccctaattttacaataacagaaatgttacgtcgtgacgaaggtcttcgtgataaagtgtattgggaccatctcgggtatcctacagtaggtattggacaccttatcataatggaaaagacccgagatatgtctcgaattaataaattgttatccgatcaagtagggcgtgaagtaacaggaaatccagggactattacattagaagaagcaacagcgttatttgagaaagaccttgctaagatgcagaaagacattcgttctaattctaaagtaggtcctgtttatgctaaaatgaacaggtctcgccaaatggcattagaaaacatgtgtttccaaatgggcgttggtggtgtagcaaaattcaatactatgcttaaagcaatggccacaggtgattggaaaacagcatacaaatctgggcgtgattcattatggttccaacagactaaaggtcgtgcttcacgcgtaacaacaattattttaactggtaacatggaatcgtacggtgttcctgttaaaacaccaccttcaccaggagtcggtgccgatttagttactagaaataccgattcagaagacccggccggtcctcctgttccattagattcacgtatccttttaaagaaccggaatcaagttatcgcggtgagtatccatacgttcatgctatggaaacagaaagtggtcatatccaagaatttgacgatactccaggtaatgaacgttatcgattagttcatccaacagggacatatgaggaagtttctccgtctgggcgtcgtactcgtaaaactgtagaagaccttttgacatcactaatggtgatgggaacttcttgatttctggcgataagcttgttaacgttggtgctaatgaaatatattataacatggcagaccgcctccatcaaatagacggcaatgacacaatctttattcgtggtaaccaaactaaaactgttgaaggcgatggaactctttacgttaagggtaatatcaaaatagttgttgacggaaatgcagatattcttgttaaaggtgatgctaaaactcaagtcgaagggaatcatgattacaccgtcaacggaaacgttaaatggactgttaatggtaatgttgatatgactgttgccggggattgggcagaaacaatgtctacaatgagctcagtagcttcagggcaatacactgttgacggatctcgtattgatattgggtaatatattggcacaaatacttcctttaaataccgacttaggagaagacatggaaggggcgtctattgacgtcctttttactccgcagttagaaacaaccgaaactttagtgtcaataaatataacagattatgaaccgacacaaggcattacggtagatggtaatcgtttatatggaacatatgaaagtgtgtttagcttttcttcggacgcattgaaataccgattaaatgatgattttgaaaccgcatcttcatgggatgatttaccaaaagatgagtccacacagttatatttgtggagagctcctcagaatcttcgtaaagtgtttagttatacggttgaaatgatttataactaccaagaagaaagttcatcaggcggcacaggaagtgactctggtacagaacctccaccggctccagtacaaaaaactcttactaaggtttatacaaaaactatagtaggaaattggagcaaatgggcacaacaattacgaaactatgtttatatgaggccataaaaatgtctggcttaagttacgacaagtgcgttacaacaggtcatgaagcatggcctcctactgtaataaatgcgtcccaatctaaagtgttcaccggcggtattcctgttcttgtagcaggagaccaaataacacctcatacagaaattaaaaaaccatacgagactcatggaggtgttactgaacctcgtacatctaaagtatacgtcaccggtaaaaggccgttcaaatggctgacccaatttcatgcggggatactgtttctcaggcctcgtcaaaagtctttataaaataggaattaaaatggcaaacactcctgtaaattatcaattaacccgaacagcgaatgctattcccgagatttttatcgggggcacatttgccgaaatcaaacaaaacattatcgaatggctccacgggcagaatgaatttcttgattatgattttgaaggttcacgcttaaacgtattgtgcgaccttttagcatataacactctttacatccaacagttcagtaatagtgcagtgtatgaaagttttatgcgtactgcaaacttgcgtagttctgttgtacaagcggctcaagataacggatatctgccttcatctaaatcagcagcacaaacagaaattatgctcacatgtacggatgcgttaaatagaaactatatcaccattccacgtggcactcgtttcttagcatatgctaaagatacttctgttaacccatataactttgtttctactgaagatgtcattgtagttaaagacaaaaataaccaatatttcccacgtcttagattagctcagggacgtattgttcgtactgaattaacatttgataaattaaaacctatcattattcgtgataagaacattgaccgtaatttagttaagttgtacgttgatggagcagaatggattaactggactcgtaagtcgatggttcacgctggttctacgtcaacaatctattatatgcgtgaaacagttgatgggaacaccgaattttattttggtgaaggcgaaatctctattaacacatcagaaggcgcgttaacatccaactatattggtggccttaaacctgttcagggttctaaaatcgtaattgagtatatttctactaatggcgcagatgctaacggtgctgtaggattttcttatgcagatacattagctaatatcacggtaatcgatattaacgagaaccctagcaataacccagactttgtcggggccgacggtggtggtgaccctgaagatattgaacgtatccgcgaattaggcacaattaaacgcgaaactcaacaacgttgtgtaaccgcttccgactatgacacattcgtctctgagcggtttggttctattattcaagctgttcaaacattcacagattcatctaaaccagggtacgcatatattgctgctaagcctaaatctggattgtatttgacttctgtccaacgtgatgatatcaaaaatttatttgaatgattataacttagggactattacacctgttgttatttcgcctgattatttgtttatcaaaatgaatatcaaagttacatacgcgttgaataaactccaagaatcagaacaatatcttgaagggcaaattattaataaaattgaccgatattatattgaagatgtagaaatttttaactcatcgtttgcaaaatctaaaatgctaacttatgtcgatgatgcagatatttctattattggttcttcagctactattcaaatggttcgcgaagtacagaacttttataaaacgcctgaggccggtattaaatacaataatcagattaaagatagatcgatggaatctaatatattctcgtttgattcgcacagacctaatccagaaaatgcaaacgaaactattaaatacggtgttcgcatagtatcttctgaccgtaatgaccgtggcataggtcaagttattatcggtccatttgccgacggtgatgttgttgaaaacgaaaatatacaaccttatacaggtaatgattttaataaacttgctgttactgacggacgaaacaaatactattcaattggtgaagtgaattatcctgccgattcgatttattggaacattgctaaaattgacctcacttcagaccgttttgaagttcaaacaattgaactttattccgaccctgcagatgatattatttttacaaaggatggttctttaatcgtattcgaaaatgacttacgtcctcagtacttaactatagatttggagcctatttcacaatgacagtaaaagcgccagcagtcacaagtctcagaatatccaagttgtccgctaaccaagttcaaatacgctgggatgacgttggtgctaatttctactatttcgtagaaatcgctgagactaaaacggcagacggggaaataattcctcctgccagctacagatggataaatttaggatatactcctaatagcaactggttcgaaagtaggcttagacccattaacttcttatattattcgtgtatcaactgccgctgaaggcttcgagagatctgattgggtatacaccgaaatatttgaatcatttcagactaacgcgtatacatttcaacatatgattgaaatgcaattggctaacacttttattagagaaaaatttacaaataacaacatggcttatgtcgattttaataacgacactataatggcagctctaatgaatgaatcgttccaatttagccctgcttatgcggatatttcatctattaaaaatttcattattggcgaaaatgagtatcatgaaattcaaggttcgattcaacaggtgtgtcatgatataaaccgtgtttatttgatggaatctgaaggaattctttatttgtttgaacggtatcagcctgtggttaaagtctctaatgataagggacaaacctggaaatcggttaaattgtttaatgaccgtgtagggtaccctgtatcaagaacagtgtattaccagacaggttataccacgtatgttcttgggtatgataaattattttacggccgtaaatcaactgacgttcgttggtctgctgatgatgtgagatttagttctcaagatataacatttgctaaaattggtgaccagttaaatttaggatttgatgtagaaatatttggtaactacgcatcattacctgctaacgtatcacgtattgcagaagctatcgtttgcaacgacgattatgtatacgttgctgctcgagataaagttcgttttattaaaactagtaatgcccctattgattcagacccgttatctccgacatattccgaacgtttgtttgaacaagaaacatttaacatcacaggtaaccctaaggcagtttgctataaaatggattctgttggcggtaaaatatttgcactgattatcggcgaagttgttaatcttaatgacgacccgaggaccactcctattgttgattctgctgataagggcgtttacgttctagaccatgatgctggcacatttaaacgtgtgtttggtaatactgaagaagaacgccgtcgtattgaacctgggtacaccagtatgtctactgatggtgttgagttatctatttcatctagtaattttaaatttctagaatcggatattgttgatgacccaaaaacacaaatcaagtacggtttaatcggtgctgttaaatatgagtatcctcgcgaatggttggctgataaacattatcatatgatggcatttatttcaactgaagactctcaatgggaatcgttcactcctcaaccgatggaatactatgctgagccattctttagttattctagaaagtctggtactcgttgttggattaataactcagacaaggccgttgtaatttattctgatttactttacactaaggttattgagaatcatccacttagttcttcagaccgtgaagttcatgaatattggaaggacggtgactgtacaatagtgatgccctaacgtagatttcaccggatttaaaaatatgcatccggcatgattttctataaatcatcaggtgagattatttcttattatgattttagttatcgtgttagagataatgtttctataatttggaagcctactaatatattcttaacagcatcgttacaaaaccaagaaaaagataccacatggactcctgtagaagagaacggcattgcggacccagatttacgaccattgctcactacaatgatgccggagtcttatcttttagataatacaaacttcgaagcattctgcgaggcttatattcagtatctttctgacggttatgggacccattataacaaccttttgaatcttattaaaaatcaatatccgcgagaagaacatgcgtgggaatatttatggtctgagatttataaacgaaacatttacttaaacgccgaaaaacgcgatttagtgtctcgtttctttgaatcaagaagttatgacttctattcaactaaaaggaactgaagcgtcatataaattcttgtttaaagtgctttataacgaagatgttgaaattgaaattgaatctagttccgggaccgaatatgatatcatcattgaatctgattcgttgacagaagatttggtcggacaaaccatatacaccgctacaggacgttgtaatgtgacgtatatcgagagaagttactctaaaggtaaattacaatggactgtaacaattcacaacctcttaggtcgtttaatccaaggacaggaagttaaagctgaaagactcccgggttttgaaggtgaaattgttcgtggtattaaaggtaaagagctttctcagaacaacatcgattacataaatcgtggtagagcatactacgtaatgaagattaaatctaaacttccatcatctcgttggaaatcagacgtattacgttttgttcatccggttggatttggatttatcgcaattacccttctcacaatgtttattaacaccggattaacacttaaacatgttgaaaccattattaataaatacaaaaactataagtgggattctggattaccgactaaatatgcagaccgagtggctaaattagacccacaaggaaatgttgagtttgaccctattacaggtaaagcgatatatgaaataggccctatggctggtcaagattatccattgcctgaagattataacgctgaaaacaataactccatatttcaaggtcaacttccatcggaacgacgtaaactgatgagcccattatttgatgcgtccggaacaacattctctagatttagagatttggttgaacaacggttaatcgataatgtaggaaatccaagagaccccgtgaatccaccacaggttaaattagatgaatgattcaagtgttatctatcgtgcaatagttacatcaaaatttagaacagagaaaatgctgaatttttataattcagttggggatggagatgataagaactccatttatattacgtttggacgttcagagccttgggcgtcaaatgaaaatgaggtgggcttcgccccaccttatcctacagattctgttcttggtgttactgatatgtggacccatatgatgggtaccgttaaagttttaccttcaatgttagattctgttattcctagacgtgattggggagatgtgcgatatccagacccttacacgtttagaattaacgatatagtcgcatgtaatactgctccgtacaacgcgacagaagttggagccggttggttaatttaccgttgtttagatgtccctgacgtagggctctgttcaatagaatctttagataataaagatgaatgtcttaaattgggtggtaaatggaccccgtctgttcgttctatgtctcctcctgaaggtagaggcgatgctaatggggttatcgaaaccggtgatggatacatttgggaatatctttatgagattcctgccgatgtgtcaattaaccgttgcactaatgaatatcttgtagttccatggccggaagaaattaaagaagaccccacccgttggggatatgaaaataacttaacttggcaacaagatgactacggtttgatttaccgtgttaaagccaatacgatgcggtttaaagcatattttgattctgtttatttccctgaggcagctttgcctggtaacaagggttttagacagatatcaattatcgcaaacccattagaagctaagaaaaatccaaatgaccctaatgttaaagcagaaaaggattattacgaccctagagacctgcaacgtcattcaggtgaaatgatttatatggaaaaccgaccacctgttattatggcaatggaccaaacagaagaaattaacattttgtttatgttttaattagggagccttcgggctcccatttttgtatctataaatagaatataatatcggacaacaaaaggcagaattatggcatttttaagcaaactcctaaacaattaatcgataccggcggacgcttgccgaaattggtaatgcctcaacaggtgatatcttattcgacggtggtaataaaataaatgacgatatcaacgctatttacaatgcatttggcgatcaacgtaaaatggccgtagcagatggaaccggacctacaggtcaaactattcatgccacaggttattatcaaaaaggaaaggcggccgattatcaaactcctattaaaccaggcactatgcatgatattgatgcttctgatggtggtgtgattgttattattgaccgtcctgaattaggtgactctgtagaattcataaattctaatgggtctatttctgttaacaatcctttaagtatccaagtaaccgatggttcgattaaaggtgttcttaataatcttgttatttccaccccttatacccatgttgttcttcgttgtgttgaacttaatgggccaacttcagtatggaattattctactgatagcatgtttgggcagaaagaatctcctgtcgatgggacttggagtcttacaggaaacacagtttctattcctctgttttatcgcaccgattataatatggctaaattgcttgttacatgccaatccgcagacggtagaaaaataaaaacatgcgaaataaatattctaatagatacaattaactcagaagttctttctactgaatttgcagtaatgcgagttggtaatgtagatgaaactgacgagattgctaatattagctttagtattattaacaactttgctactatgacgattacatccgatattattggattgcgttcagcagttaaaattatctcaacacagaaaattggggtcgctcaataatgaaacaaaatattaaaattggtaacgtcgttgatgacggacaaggcgattaccttcgtcgaggtggtgaaaaataaatgagaactttgacgaaatctattatgaattaggtgatggtgaagttccttatgccgctggcgcatggaagacttatgatgcggctgatggtctttttaatcttaatgctgcttggggtaaatcttatgcaattaatactacttctggacgagtttcagtaaatcttcctaaagggacaattgcagactataataaagttattcgtgctcgtgacgtatttgcaacttggaacattaaccctgttactttaattccggcaaacggagacacgattaaaggttcttcatctccggtagaaattaacgtccagttctctgatttagaattagtttattgtgctcctggacgttgggaatacatcaagaacaaacaaattgataaaatagttagctctgacattagtaatgttgctcgtagagaatatctggttgaaacccaaggtcagaccgatttcatggatgtttttaacgggacatcttataacgttaacaacattcgcgtaaaacatcgtggcaacgaattgtattatggcgatgtattcagtgataatagtgattttggttcaccaggcgataatcctggtgaactggttgcacttgatggatttaatattagattacgccaaccatgtaacgttggggatactgtacaaattgagacattcctagatggtgtttctcagtggcgtagttcatatactcgtcgccaagttcgcattttagatagtaaattgaccgctaaaaagtctattgacggaagtatttacgtcactgatttgagtacgttcaggtctattccatttacagcatttggtattaaccctacagaaccacctaacccgaattcattagaagttcgcttcaatggtattctccaagaattagctggtactgttggaactcctattttccgttgtgaaggtgtggatgctgattctgaagagtcatgcactaatctcggtgggacgtggactcaatcgtatacagattatgcgattgaatatactgataatatccctagcgcaattctatttgaccgtcaatttgaagaccaagacattattaccatcacatggtttaataacgatttaggaactcttcttgaaatggaagaaatccttgatgtcgctgatgagaaatatgtttctcaagggtctaacattgaaattactggtgacgttgcattaactgatttcgataaaattggatggcctaatgtagaacctgttcctaagtatgaacgtgaattctcgactatctcagcaatatttgatacaatttatcctgtcgggactatttacgaaaatgcggttaaccctaataatccggccacttatttaggttttggttcgtggaaaatttggggacaaggcaaagtattagccggttggaatgatgacgcatcggatcctaattttgcattaaataataatgaccttgacatcaatggtaaccctactcataccgcaggtggtaccgttggtgtaacaactatcacattagaaaatgctgatttaccagctacacaaaccgatgaaaaggttcttatttctgatgataatggtacagtaattataggcggttgtcaatatgaccccagatgcagaaggtcctatttacactaaatatcgtgaagaccatgcaaagactaatggatctcatgttccagcacgttctataactaatattcagccatctataactgtataccgttgggtaaggattgcataatgactgtacttaatacaaaggcgggagttatttcccgtcatgctgattttttgaattacacagaaaaatccagctcaaatcgatgttttaaacaaccaagctgtaggttccgtgactatttctcagttagctcgcggtttttatgatgctaacgtagaatctgcaataaatgatgtccataatatggcacgagctgatattggtactgttgtcacaaacacttcaggcgtatcgcctgaaggtgcagcacaagttgattattggactttttccggtgatgttctcgacgatactttggacactggaacgccagtcgttattaacgtatttggacttgccgttaaagcaacaatcggtatgactgataacgaattaacggcacaagttcgtatagctttacaagaggccattgctaatcaaatcgctatttcttcttataaagaccatccaactgaaggtaataaacttcaggtgacatatttagataaccaacgtcatgtgttgccaacatatgcttcgtttggtgtaacaatttcgcaagaaattttgtctgaagcaaaatccggatacggaacatggaatttattgggtgcccaaacggttactcttgataaccatgatactcctaccgttttctaccactttgtgagagcctcatgagtaataacaatacataccaacacgtttcaaacgaatccatttacgttgaattcgaccctacggggacgaattttccagatacagtcactaatgtccaagccgcattagctgctatttctccttcaggtgttaatggtgtaccggaagcaacaactactacaccaggaattattcaaatagctactccacaagaagttattgatggatttagataataataaagctgttactccagcatcactgaatgctcgtctacaatatcctaatgcaaccgaaactcaatatggcttaactcgttatgctactgaagatgaagcagtaaccggaactattgacgatgcatcaattactccgcttaaattgaatcaaaaaatagacaatgtatttcagacaaaagtgtcaacagaagcaacaaatggtgtaattaaaatttcaacttctgctgccgcattagctggttctgatgatacaacggcaatgactccgttaaaaacgcaacaattagcaattaaacttatttcacaaattgctccaaataatagtgacgccaccgaatctattacaggtgttgttcgtttggctacagttgctcaagcacaacaaggcaccctgcgtgaaggctatgcaatttcgccttatacctttatgaattcagtagcatcagaaactaataaaggcgtcgttaaactagggacacagactgaagtaaatagtaacaactcttcagttgtagtgaccggcgcaacattaaacgggcgtggggctacaacttctttacgtggagttgttcgtttaactacacaagcgggtagccaatcaggtggtgatggttcttctgctcttgcttggaatgctgatgttatccaccaacgaggcggacaaactattaatggcacacttcgcattaataatacgttgacggttggttctggcggcgctaatataactggtaatgtcaatatgacaggtggttatattcaaggcaatcgtattgtgactcaaaatgaattagaccgaattcttccagttggcgctattacaatgtgggctgcagatagtttaccgagttccgactggcgcttctgtcacggtgggactgtttctgcttcagaatgtccagtatatgcttccagaattgggacacgatatggtggtagttcttctaacccaggcttgcctgatatgcgtggattatttgttcgtggctcaaggtcgtggctctcacttaacaaatccaaatgttaatggtaatgaccagtttggtaagcctagattaggtgtaggttgtactggtggatatgttggtgaagtacagaaacaacagatgtcttatcataaacacgctggcggatttggtgagcatgatgattctggagcattcggtaatacccgtagatcaaattttgttggtacacgtaaaggacttgactgggataaccgttcatacttcaccaatgacggatatgaaattgacccggcatcacaacgaaattccaaatatacattaaatcgtcctgaattaattggaaatgaaacacgcccatggaacatttctttaaactatatcattaaggtaaaataatggctgatatatctctggtagatttaccatatgttgacggcccgccagacgcgggtcagagtcgtattgaatggattaaaaacgatgaagaaataacaggtgccgacacaaaatacggttctgaaggtgtgtaatgaaccgtcctattgttgaagttcaacgtaacgtagaagcgttagatgttaatattaaaactatagcatcttctttgaatacggccaatgaagatatcaaagttattcaaggtattttagatgtttctggggatgttgatgctcttgcacagataggccagaacacccaagatatcgatgtcattaaagtcacagttcaaactcatgccagtgaattgaatgatttgaatgaacatattgatgcgaatactgatgatattggtgtttataatcaggaaacagattcagtttatagaacggttcgtaatgacctgctttggattaaaaatgaattaggacaatatactggtcaagatattaatggggttcctactccaggaaatgatagcactggtatgaaacgccgtattatgactaatagctccgtaattgttgaccacggcgttcgattaactgatttagaaactaaatttgctgattctgacgtcggctctttaactattgaagtcgaacgcttacgcgaagaaatgggacctcgtacttctttcactactccagtgtttagtcgtctttccggtattgatttaaccttgtcgcgtcaaaatgctgacttggacggcattaaacagtctattggatatcctaatacgacttctattattactaccactaatgcaaatagttcagcaataaatgacattaatcttgagctcaatcaatcaggtggtattaaacctcgtttgactacagtagaaactgccattggcgctgatgatttgcctactacaatccaaggtcgtattaaactcaatactgatgctatcggagcattgaacactgttgtcggctctgattcttcgtcaggattgcgttttaatgtgtcatggttaaataacgtagttggtgttgacgcttcaggtgggaaaccggaaccagccgactctttgctttatcgtactcgagagcttgaaggaactatcagtgggatgagtaatgacattcagaacattcaaactgatgttgggactactaccacaggaattaagggttctgtaaacacattaaatactcttataaatggcaccaacccaaatggttcgactgttgaagaacgcggtatattgcctacagttaaaagtcatgatacgacaattaatagtttaacttctagaattgctactcttgaaactgatttggccgctgcagaagctgaaatccaaactcttaaggaagctggatatattgaagatgctccttcagacggtaaattctatgttcgcaaagatggtgcatgggttgaacttcctacagcttaatgaaaagggccttcgggccctaaaggatttatatgtcaggttataatgcacaaaaccctaaagaattaaaggacgtaatattacgtcgtttaggcgctcctattgtaaatgttgaattaactacagaccaaatttatgattgtatttcacgagcgttagaactttatggcgaataccattttgacgggttgaataaaggtttccatgtatttttgttgatgacgaagaaaaataccgtcacggcgtatttgatatgcgtggttctaacgtatttgctgtaacaagaattataagaacaaatgttggctctattacttcaatggatggtaatgcaacttatccatggttcactgatttccttttaggaatggcaggtgtttcaggtggtatgggtagtaattgtggtaaattctacggcccgaacgcttttggcgctgatctcgggtattattctcaattagtatcttatatgggtatgcttcaagatatgattgctcctcttccagatttttggtttaactctgcaaacgagcaattaaaagtaatgggtaactttagacagaaagatgtcattattgttgaatcatatgttcgctcttatatcgagacccataagatggtaggaaatacagtagggtacggacaggtcggtcctcgtgattcatggtctatttctgaacgttatgataatccagaccataatttggtcggacgtcgagtcggtgaagatcctgcaactaaacaaggcgcatataacaaccgctgggttaaagattatgcaactgcattagctaaagagcttaacggacaaattcttgctagacatcaaggtatgatgttacctggtggcgtcactgttgatggtgttcgattaattgaagaagctcgtttagagaaagaagctttacgagaagagttatatttactggaccctcctgcaggtattttggtaggttaatatggcaacttatgataaaaatcttttcgccaaactagaaaatcgtggtgggtattctcagacaaatgaaaccgaaatcctcaacccatttgtcaattttaataactatgagaatagtcagacattagctgatgttctagtggcagaaagcatacagatgcgcggtattgaatgtttttatgttccacgtgaatatgtcgccgtggaccttatctttggtgagaggaccttaaaaataaatttactaaagcatggaaatttgctgcatatctgaactcttttgaaggttatgaaggagcgaaatccttcttcagcaacttcggaatgcaagttcaagacgaagttacattatctattaacccgggtcttttcaaacaccaggtcaacaatcaggagcccaaggaaggtgatttaatatacttcccaatggataacagtttgtttgagattaactgggttgaaccatatgacccattctatcaagtaggtaaaaatgcgattcgtaaaattactgcaggcaagtttatttactcaggtgaagaaatcaatccggtgcttcagaaaaatgaaggtatcaatatacctgaatttagtgacttggaacttaaccctgttagaaatcttgacggtatccatgacattaatatcgatgaatattctgaagttgagcaaatcaattcagaggcaagtgaatacgttgaaccatacgtagtagttaacaaaccgtggtagacaaaattcaccatttgacgatgggtttatgaattaataaatagataagataaagcaaacaccggtcgaaaggccggttaggagaaatgatgtttggctatttttacaactcgtcgttcaggcgatatatcacaatgatgggcgatttgttttcaaatatccaagttaaccgtcaattgtctacaggcaataaattaattagagttcctattacgtatgcatctaaagagcactttatgatgaaacttaataaatggacctctataaactcacaagaagatgtggctaaagtcgaaactattctaccacgtataaatctccaaatggtagatttcgtttataacccaacgtttaaaacgaatatattgaataactctcttttgagtaaatcgactaaggatattgtagaccaatacaacccatcaccaattaaaatgatttttgaactgagcatctttactcgttatgaagatgatatgttccaaatcgttgagcaagcaaattattccatattttcagccgcattttaatacgactatgattgagcaatatggacaggatattccatttgaaagggatattaaagtcgtatggatggcagcagcaatggatgaacaaatagacggtgataatttatcccgtcgacgtttagagtggtcattaacatttgaagtaaatggatggatgtatcctccggtaggcgcagctgaaggccttattaaaacaacttatcttgattttcatgctaatgaacgagaccttcaaacagccgccagtgtttttgaatcagttgatacagaaattaaaccgagagacgttgaagcacaagattggaatggcgaagttgaacaaacttatactcatgatattccaatcccgactccaccaacccctcctggtcctagaaaacaataagaggtaaatatggaaggtctagatattaataagcttttagatatctctgacctccctggaatatctggggaggaagtagagaggggtatatgctcctttacaattggtggaagttcaaagtaatcctcaaaaccgcaccccggatttagaagatgactatagcgttgttcgtaagaatatgcacttccaacaacaaatgttaatggacgctgccaagatttttcttgagacggctaaaaatgccgattctcctcgtcacatggaagtatttgcaactcttatggggcaaatgactacgacgaacaaagaaatactgaagcttcataaagatatgaaagaaatcacatctgaacaggttggcactaaaagtgcggctccgtccagccagatgaatatccaaaatgctacagtgttcatgggctctccaacagaattaatggaagaagtaggagatgcttacgaggctcaagaagctcgtgagaaggtgattaatggaacaaccagttaacgcattgaatgataatcacccattgaatgaaggtgacaaagttgttattctaccgcctcatttagctgaacgtaaaggaagaagatggtatccattggattaaatcccaatgggatggtaaatggtacccagaaaaatttagtgattatctacgtataaacaaaatagttaaaattcctaataactcagataagcctgaattatttcaaacatataaagataagaataataaacgtacacggtatatgggtttaccaaaccttaaaagagcaaatataaaaactcaatggacatatgaaatggtcgctgagtggaaaaaatgccgcgatgacattgtatattttgctgagacatattgtgctattacccatatcgactacggtacaattaaagtacaacttcgtgactatcaacgtgatatgcttaaaataatgtcttctaagcgtatgactgtttgtaacttgtcacgccagctaggcaaaacgactgtagtagctatttttcttgcacattttgtttgctttaacaaagataaagcagtaggtattcttgcacataaaggctcaatgtcggcggaagtagtattagaccgtacaaaacaagcaattgaattactccctgattttttacaaccaggtattgttgaatggaacaaagggtctattcagttagacaacggttcctcaattggtgcttatgcttcatccccagatgccgttcgtggtaactcattcgcaatgatttatatcgacgaatgtgcgtttattccgaactttattgattcatggcttgctattcagcctgttatttcatctggacgtcgttcaaaaattattattacaactacaccgaatggattaaaccacttttacgatatttggactgcagctgttgaaggtaaatcaggatttgaaccttatactgcaatttggaattcggttaaagaacgtctatataacgatgaagatattttcgatgatggatggcagtggtctaaacaaaccatttcagcctcttcattaacacagtttcgtcaagaacatactgcagctttcgaggggacatcaggcacacttatttcccggtatgaaattggctatattagattacattgaagttacacctgatagtcatggatttcaccggttcaaaagcctgaggaaggacataaatatattgcgacgttagactgttctgaaggtcgtgggcaggactatcatgcaatgcatattattgatgttacgacagataaatgggaacaagttggtgttctacactctaatactatttcacaccttatactccctgatattgtgtttaaatatctaatggaatataacgaatgtccaatttatattgaattgaactcaacaggtgtttctgtcgctaaatcactttatatggaccttgaatacgaaaacgttatttgtgattcaatgaatgatttaggcatgaagcaaagtcgtagaactaagcctgtaggttgctccacattaaaggaccttattgaaaaagacaagctcaaaataaaccatagggctactattcaagaattcagaacgtttagtgaaaagggtgtatcttgggcagctgctgaagaaggttaccatgatgacttagtgatgggccttgttattttcggatggttgacaacgcaacagaaatttgcagactatgcggataaagatgatatgcgtcttgcatcagaagtattctcaagagaattacaggatatgaatgacgactacgccccggttatatttgttgactgtgcaagtaattcagccgaatataatccatcagcacatggcctgtcaatggtataaataaaataaagcaaattaagaggaattaaaatggcacttctctctccgggcgttgagctcaaagaaactaccgtacagagtactgtagttaataactccactggtactgctgccctggctggaaaattccaatggggacctgcattccagattaaacaaatcactgatgaagttgcattagttgatatgtttggtactcctaatacggatacagcagattatttcatgtctgctatgaacttccttcaatacggtaatgaccttcgtgttgtacgcgcagttgatcgtgatactgctaagaactcatctcctgtagcaggcaatattgaattcacaatctctgccgctggtagtaactatgcggttggtgataaaattatcgttaagtatttgaccgaaactgttgaagcagatggttatgtcacttcagttgatgtcgatggtaaaattcttaacatttatatcccaaccggtaaaattattgctcgtgcaaaagaaattaatgaatatccggcattgggttctaactggaccgccgaagttgccagttcttcttctggactctctggcgttattacaattggttctatcgtaaccgattcaggtattctgttgactgaagttgaaacttcagaagaagctattacttctctaactttccaagaatctattaaaaatatggtgtcccaggcgtagttgctctttatcctggtgaacttggcgaccagctcgaaattgaaatcgtatctaaagcagactactatgacaaaggtgcttcagcccagttaaaaatttatcctgatggcggtactcgtgcatctactgctaaagcaatctttggatatggcccacaaactgatgaccaatatgcaattatcgttcgtcgtaacgatgctgtagtccagagcgtagttctttctactaaacgtggtgaacgagatatttatggtagtaatatctttattgatgatttctttgctaaaggcgcaagcaattatattttcgctactgcacaaggttggccaaaaggtttctctggcgtaatcaaactgagtggtggcttatcatctaatgaaacggtcgacgctggtgatttaatggaagcttgggatttgtttgctgaccgcgaatctgttaatgcgcagttgtttattgccggttcttgtgcaggtgaatctttagaagttgcttctacagttcagaaacatgttgtagcaattggtgattctcgccaagattgcttggttctttgctcaccaccacgttcaactatagtcggtattcctgttaatcgtgcagttgataatcttgttgattggcgtactgcatcaggaacttacactgataataactttaatgtaagttctacttatgctgctattgacggtaactataaatatcaatatgacaaatataatgatgtgaatcgttgggttccattagctgctgatatcgctggtctttgtgctcgtacagacaatatttctcagccttggatgtctccggctggttataaccgtggacaaattcttaacgttattaagcttgcaattgaaactcgtcaaccacaacgtgatcgtttgtatcaggaagctattaaccctgttactggtaccggtggtgatggatatgttctgtatggtgataaaactgccacttctgttccttcaccatttgaccgtattaacgttcgtcgtttgttcaatatggttaaaacgaacattggttcagcatctaaatatcgcctgtttgaattgaacaacgcatttacccgttcttctttccgtacagagacttctcaatatctacagggtattaaagctctcggtggtgtatataactttaaagttgtttgtgatactaccaataacaccccagcagttatcgaccgtaatgaatttgtagctactttctacttacaacctgcccgctcgataaattatattacgttgaactttgtagcaacagcaactggtgccgatttcgacgaactgattggtgctgtaggtggttaataagacgcctgatgggctatttcggtagcccatataaatatactatatcgtttaaaaattaattctatgggcatccggttaatcctaagcccatattactacagaggctaatatgtttgtagatgacgtaactcgtgccttcgaatctggtgatttcgctcgccctaacctgttcgaagtagaaatctcttatcttgggcaaaactttagcttccagtgtcgtgctacggctcttcctgctgcgatcgttgaaaaggttcctgtttcttatatgaaccgtaaaattaacgtggcaggtgaccgtacatttgacgattggactattacagtaatgaatgacgatgctcatagtattcgtcagaaatttgttgattggcaaggtattgcagcaggacaaggtaatgaaattaccggtggtaaacctgctgaatataaaaagactgctatcgttcgtcaatttgctcgtgatgctaaaacggtcactaaagaagttgaaattgttggcttgtggcctactaacgtcggcgaagtatctcttgactgggattcgaataacgagattgaaacgttcgaagtaactcttgctcttgattggtgggaataatctggttggggagaaatccccagcttcccgtgatgacggagaagtccatataaatataactataattcccattcggagaatacaatgaaatttaatatcttaagtttgtttgctccatgggcaaaaatggacgaacgtgattacaaagaccaagaaaaagaaaatttagaatcgatcaccacaccaaaattagacgacggcgctaaagaatacgaagtatctgaaaatgaagcacagcaaacatataatgctatgtttcagagaatgttcggtagccaagaaccagggctcaaatcaacgcgtgaattaatcgatacgtatcgaaatttgatgacgaactatgaagtggataatgcagtctctgaaatagtttccgatgctatcgtatatgaagatgatacagaagtcgtttctataaatttagacaacacaaaatttagtccaaatatcaaatcaatgatgttggatgaatttaacgaagtgttaaatcatttatctttccaacgtaaaggttcagaccattttagacgttggtacgtagattctcgaattttcttccataaaattattgaccctaaacgccctaaagaaggtattaaagagcttcgtcgtttagacccacgtcaagttcaatatgtccgtgtgaagttattacaaccactgaagctggtgttaaaatagtcaagggttataaagaatatttcatttatgacacatcacacgaatcttatgcttgtgatggtcgcatatatgaagctggcacaaaaataaaaatccctaaagccgcgattgtttatgcccattctggtttagttgattgttgtggtaaaaatatcattggttatttgcatcgggctattaagccggcgaaccaattaaaacttcttgaagatgccgtcgtaatttatcgtattactcgtgctccagatcgtcgtgtatggtacgttgatacaggtaatatgccttcaagaaaagcagcagaacatatgcaacatgttatgaatacgatgaaaaaccgtattgcatatgatgccactacaggcaagattaaaaaccaacagcatattatgtcgatgaccgaagattattggttacaacgacgtgatggtaaagcagtaacagaagttgatacattaccgggtgcagataatactggaaatatggaagatgtacgttggttccgtaatgcgctttatatggctttacgtattcctattacccgtattccaagcgaccaaggtggtatacagtttgatgctggtacttctattacacgagatgaattgtcatttggtaaatttattcgtgagctgcaacataaatttgaagagatattcctagacccgcttaaaactaatttaattcttaaaggaattattacagaagatgagtggaatgatgaaataaataatattaagataaaatttcatcgggatagttatttctcggaattaaaggatgctgagattctggagcgtcgcattaatatgcttcagatggccgaaccatttattggtaaatatatttctcacagaacagctatgaaagatattcttcagatgtctgacgaggaaattgaacaagaggctaagcaaattgaagaagagtcgaaagaggctcgtttccaagaccccgaccaagacaacaagaggatttttaatggacgatttaattcaagctattaaatcaaacgacctcgttgctactcgaaagttttttgaaagtgcaatggcagaaaaaacggttcgtttgattgaagcacgcaaagcagaaatcgcttctcaatttttgattgaaggcgaagaacctgaagaagaaaagaaagctaaagcttcggaagacgacgctgatgaaggcgatgacgacgaagacgaagatgatgaggacgatgaataatgtatcttatccctgaatcttatgaattggtactcgaaaatgtcgaagcacttattcctgaagcacagggccgaatcgatgcattgtcttctgctctcgatattgacgatataaatactattatcgagaacatgcttgaaactgaaacggatttagctgttgcaatggcttccattattaatgaagaacagttaaatgagtttatcgttaaacatgtttcttctcgtggtgaagtcacccgcactaaagaccgtaaaactcgtgaacgtaacgcgttccaaacaaccggtctttctaaagcaaaacgtagacaaatcgctcgtaaggtcgttaaagctaaaaaagctaacccttcaggccaagttaaaggcatgcgtaagcgtaaaaagctcttaaacgtcgtaaagcattaggattaagctaatgaataaacccgagttacttattgaaacttggggtcaacccggtgagattattgatggcgttccaatgttggaatctcatgatggaaaagattctggcttaaaaccagggctttatatagaaggtatttttcttcaggcagaggttgttaaccgaaataaacgtttatatcctaaacgcgttttggaaaaagcagtaagtgactatattaaagaacaagtcgcaaccaaacaagcccttggagaattaaaccatccacctcgcgcaaatgttgaccctatgcaagccgctatcattattgaagatatgtggtggaaaggaaacgatgtatatggacgcgctagaattattgaaggtgaccatggtcccggtgataaattagctgctaatatacgagctggttggattccaggtgtttcctctcgtggtcttggttctttaaccgacaccaataaagggtaccgtatcgtgaacgaaggatttaaattaaccgtcggtgtagatgccgtatggggaccttctgctccagatgcttgggttactcctaaacaaatatcagaatcagaaaattcggtggaaatcaccaaaaacagtgctgatgaagcatttaaagctctcgcagagagtttaaaagcattataaataataatgtaatctaaaccacaggacactaaaatgatcaaagaacaacttttgaaagaagctcagaacatcgagacttcagttgctcttaatagtgttttcgaatcagtagaactgtctccggacgttaaagctaatttcagcactgtattcgaagccaccgttaagcaggaagcagtcaaaactcctggctgaatctcatatcaaagccatcgccgaaaaggctgaagaagaagttgaaaaggccaaagaagatgctgaagagaaagctgataaaaaattggctgaacaagcttctaaattcctagaccatcttgcaaaagaatggctcacagaaaaccaaatcgcagttgataaaggcattaaagctgatttgtttgaatccatgcttggtggtctgaaagaactgtttgttgaacataacgttgttgttccagaagaatctgtagatgttgtagcagaaatggaagaagagctggccgaacataaagaagaaaccgctcgtttgttcgaagaagttaccaaacgtgatgcatatatcaattacgttcagcgtgaaaccgctattaatgaaagcgtaaaagacctgactgaatctcagaaagaaaaagttattggcctggttgaaggtatggattattctgacgcatttggtactaagttaactgctattgtagaaatggttaaaaggttctactaaagaagaagccgctattaccgaaagtataaatacagttgacaatgacgctgccggtcttaattttgttgccgaagcagttgacactaccacaactcaggtagaacagaattctaatgtaagtttatatgcgaaagtcgcatctcgtttctaatttaaaggttaacacaaatgactactatcaaaactaaagctcagctcgtagacaaatggaaagaactgctggaaggtgaaggcctgccggaaatcgctaatagcaagcaggctattatcgctaaaatcttcgaaaaccaggaaaaagatttcgaagtatcccctgaatataaagacgagaaaatcgctcaggcatttggttctttcttgaccgaagctgaaattggtggtgaccacggttataatgctcagaacatcgcagcaggtcaaacctctggtgcagtaacccaaattgggccggcagttatgggtatggttcgtcgtgctattcctaatctgggatcgcttttgatatttgtggtgttcagcctatgaacagcccgaccggtcaggtatttgctctccgtgcagtatatggtaaagaccctatcgctgctggcgctaaagaagctttccatccgatgtatgccccagacgcgatgttctctggtcagggtgctgctaagaaattcccagctctggctgctgacactactactgttgtaggtgatatctatactcacttcttccaagaaactggtactgtatatctgcaagcttctgctgtcgtaacacttgattctagtgcaactgatgcagctaaattagatgcagaagttaagaaacaaatggaagccggtgcactggtagaaatcgctgaaggtatggctacttctatcgctgaactccaggaaggtttcaacggttctaccgataacccatggaatgaaatgggcttccgtatcgataaacaagttatcgaagctaaatctcgccagctgaaagctgcttactctatcgaattaattagcacaagacctccgtgcagtacacggtatggatgctgatgctgaactgagcggtattctggctacagaaattatgctagaaatcaaccgtgaagttgttgattggattaactactcagcacaggttggtaaatctggtatgaccctgactccaggttctaaagctggtgtatttgacttccaggacccgattgatatccgtggtgctcgttgggccggtgaaagctttaaatctctgttgttccagattgataaagaagcagttgaaattgctcgtcaaaccggacgtggtgaaggtaacttcattatcgcttcccgtaacgtagttaacgtactggcttcagttgatactggtatttcttacgctgcacagggtctggcttctggttttaataccgacactactaagtctgtatttgccggtgtacttggtggtaaataccgcgtatatatcgaccagtatgctaaacaggattacttcaccgttggttacaaaaggcgctaacgaaatggatgcaggtatttactatgctccttacgttgcacttaccccactgcgtggttccgatcctaagaacttccagccggtaatgggctttaaaactcgttacggtatcggtgttaacccgtttgctgaaagttccctgcaggctccaggtgctcgcatccagtccggtatgccgtctatcctgaacagccttggtaagaacgcttacttccgccgtgtatatgtaaaaggcatctaatcttaattgattaaatcttattttgggagacttcggtctcccatttttggttttatttctgtgcaatttcgatgtaagttttcaaaatattttgccaattaggcataccttcttggacatatgctggagaaccgtctttgtttttgaatgatgcaagtttatcagtggcccaataacctttagctcgagcttcagaatcaactttcatccatactttgttgaaggcattaccattaacttttgcaccatatttttctactaacttaactgcttcagcttctagaacttttaaagtatctcgtaagaaacgtgctttagtcattttgtttactcctctgtagttgataagtctatagtatcacataccaaatacgttgtaaacaatctttataaataatctatatcacataaggaaaaatgcaatgagtaaaatccaaaaattattgcgtgaatctacaacgtctactagcaactcaatcggtcgcccaaatctcgttgctttgactcgcgctacgactaaattaatatattctgacattgtggcaacacaaagaactaatcaacctgttgctgctttttatggtattaaatatcttaacccagacaacgaattaacatttaaaactggtgctacttatgccggtgaagctggatatgtagaccgagaaaaaattaccgagctcacagaagaatcaaaagtcacactaaataaaggcgattttttcaaatataataatatcgtctataaagtgttagaagatacaccgtttgcagatattcaggaaagtgatctagaattagctcttcagattgcggtcgttcatttaaaggtacggctattttcagatgcagcggtaacaagcaaatttgaaagctctggtagcgaaatttctgatgcaagattccagattaataaatggcaaacttcagtcaaatctcgtaaacttaaaaccggcctcacggttgaattagcgcaagatttggaagcgaatggatttgatgcccctaacttcttagaagatttgcttgctactgaaatggctgatgaaattaataaagatattcttcagtctttaattactgtatcgaaacgttataaagttactggaattactgacaccggatttattgacttgagctatgcgtctgctccggaagcaggtcgttcgttatatcgaatggtgtgtgaaatggtatcacacattcaaaaagagtcaacttatactgcaacgttttgcgtagcttcagctctgtgcagctgctattcttgctgcttcgggttggttaaaacataagccggaagatgataagtacctttcacaaaatgcttatggattcttggcaaatggattacctctttactgcgataccaacagtccgttagattatgttattgtgggtgttgtagaaaatatcggcgaaaaagagattgtagggtccatcttttatgctccatacactgaaggaatggatttagacgacccggaacatgtcggtgcatttaaagttgtagttgatccggaaagcttacaaccgtctataggtttattggttagatatgctttatcagcaaatccttacacagtagcaaaagatgaaaaagaagctagagtaattgatggcggggacatggataaaatggcaggacgttcagacttgtctgttttactcggtgttaaattgcctaaaattattatagatgaataaacgaaaaagggaccgtaaggtccctttttcttgttatgatactaattcaatccatgcaggacgcagaacatcttgcaccattcggactaattctttcttaacaagactcgggtcatcggatgatgttaatacaataccttcacgagaagtttcttccagaatatcttgaacagtcaatcccatcactttgccaaaatcttttggcgttactgtcccaatcttagaaatcacattgttaacacgatttaatgtaacataacaagctagaacatcaagcaagtttttgtcaatttcggttaatggaacctgagttttaataggcttatcagactttttcttttcactgaatttagagttcttgcacttaatagctacacgagtaccgtttggcagccatttttaggaaacaaggcttcagaacataaccttctgccgtattatcaccaataacattagcatcaaatacacaattatttgcttcgacaaggtcttctgacgcagtagcattataagcggctaagacggaatcaaggtcatttggaatcatgataagagaatcaaatgttccacgaccaagcattggtgccattttaaaaccaaattcattacagaaatcttgcatttcgtaatcggtcaaatacgtattatcaccactttctgtattgataatgatatcgaacacataaaaatctttttcaccgtagtcaacacctttctggattccaccaccagcgaattcaccgaatacttgatatgatacggctcgagctgtgtacatgaattcctgaacggctttaatagctttatcatacttcttgagtacgatttcataaccgtaaaaatcttctgctggaagaatagggcctgtgcgcttggcgcatgtgacgttgtcacgttcaataattaaactaaagttggtcccatggattttctcacgtgctacccaaacaccagtagtcaaaccattagtgtagagtttttcaataaacttagagttgtagtggttttcaagactgctgtatttcttaaacataaatcaccattataaataataatatcaaaataattagcagagactctatctccgacccgatgtttaatttgaatggatagaacctagattcattataccatcaaaaatgtaaagcatattagaacttgatttctatccaatgcccatcacgttggtcatgattaattttgtactgaaagccgttatcacgaagccactgaccgacttgctcggtgatagttaaatcattctttgatggatagtacgtgaattgtgtctgacctttgtcagcggctttctctgccatcgcagagaagttagtaataaaatcactcagcaaattagctttagtggccagagccctttctcttaattcctgtgcaaaactcatttcttcacctttttgttaatcaaacgtttacggtatacaactttttcttttgctttaaactttgaccgagctgtctcggctttagtccatagtaatccaacttctttaggttgtaaaccaattttttgagcaatttctacgagatgaaaatcccgcctcatgtaatgtataaacttcaacttcagctctcataatcaatcccatattatttggtttgtgccattatatacattgatctcaagttgtgttttgtatgctttaaaaacgaagaaaggggccgaagccccttacgattatggatatgtatagatgataccagtttccaaagcagttttatggatgatgtatccattacgcgattcttgaacatcaacttctgggtagtctttcatcatcttctgaagagtgtaacgatgcaggtagtatttactatctggatcttcagttttccaatctttaccttcttcagtcatttttgtatttcatccataacccaccaaccgcaccagatgtaagctgaagtacgatgtggaagaggatgaacataaggtaattcaccttctggttctggagcaactttatcagtcacttgaacttgaccttctgctgtaatagttttgctatcatagtcatctgcagtaacgacggcagtaacttcaatagtttgacttccaacagatgaagtatcaactgtatatacattagttgacccttctacaggagaagaatctttcttccatgaatacgtaatttgcgcttcttctggagcatcagtgacattagcggtaaatgtagctgaagcatcttgctgaacgttaatagaaggaggagtcaatgtaacctgtggattcattgtcttcttattaaccgttaatgatacttcattcgaagtaacttcctttgcatcataatctgttgcggttacttgggctacgcatttaattcttttactccacttgtagttggagtatagctaaatgtagagttagtttctccaccaacttgtgaatcatctacataccactgatacgtagcagacgctccagcaggttgagaagctaaggcagcagtaaattgaacttgggttccaattactccagctgaaggactattgggagttactgccaacgtagttgactgagttttatttttaaccgtgatagtcgtagtaatttctgctgtttcagcgtcagtatcaggaatagtatttgttgcaacaactttaattgtttttgttccagcgggtccttttaacacataatcaaaagtttctgccgatcctacttgaggagcatcgtctacactccatgcataggtaatagttccacctccagtttcaccactgggagtagcagtaaactgcttagtctcgtctataactccagtaggtgttttaggagttatatcaactgtaaaagccataagttatccttattttaatgttacgaaagaagaattacgagtttcacgaattagaactgatccatcgcgattaatataataaattaagctaaataatgtttggtgagcagaagcatgcacaaaactagttgggcgagatttccaatctggggtttcggctatccattgataaatccaccaaggaacagtaacatatcctgggcctttgcctaatttaatgagtgtaggactaaaattttcaggcagaacaaaatttacttctttatttacttctgtctcaggctctttttcagattcaacaacctgagtaattgcttcttcaaatttatcatggtcgaattctttttcttgttcgacaacttctaatacttcaacttggtctgttggagaatcaaacaacagaatagcttcttctttaacttcttcgttggtgaaattaacaccgtccacatcatctgcggcagtaattaaatcggtgatagataatccatcagtttcaggtaacggttcatcagccagtgcgttaagagcttcttcgatatcaataacaatattatcgaatgattttgttttcttaacactaatgccaaattgttctgcatattcaaacagtttag

SEQ ID NO: 3 - DNA, 33737 bp, Escherichia coli phage ECCR-664
  source 1..33737: mol_type = genomic DNA
tctcttcagaagataaaggtgaatggaagctgaaactcgatgcatccggtaatggtcaagcggtaattcgtttcctgccagcaaaaactgatgacgcactaccatttgcaattcttgttaaccacggtttcaagaaaaatggtaaatggtatattgaaaattgctcttctacacacggtgattacgactcttgtcctgtatgtcagtacattagtaaaaatgacctgtacaataccaacaaagctgaatattctcaactgaaacgtaaaacttcttattgggctaatattctggttgttaaagaccctcaagctccagataacgaaggtaaagtatttaaatatcgtttcggtaaaagatttgggacaaaatcaatgcaatgattgcagttgataccgaaatgggcgaaactccagttgatgttacttgtccgtttgaaggtgctaacttcgttctgaaagctaagcaggtttctggttttagcaactatgacgaatctaaaattcttaggtcaatctgaaattcctcgtattaatgacgaagcattccagaaagaactatatgaccagatggtagaccttactactttgacggctaaagaccagttcaaatcctttgaaaaattaaatgaatctttcgctaaggttcttggtactgccgctcttggtggtgcagcagccgcagcagcttctgttgcagataaagttgcttctgaccttgacgattttgataaagacatggaagcctttagttctgcaaaaactgaagatgacttcatgagctctacctcatcctctgatgatggtgacctcgatgacctgttagctggtctataataaatcgggagacttcggtctcccttttgagtatctgcaaattgccgaaaaagttgtttacttcttccctagatgtgatactatagacttatcaacaacatgaggaaatcaaaatggaaatcggaaaatcttatatcattaaccctttatttaaaaatgactttgcgctaacgagtgccgttgcaatacaataatgctaaatttaatagagaagcacggacctagttttgttgtagatgaaatggaaagtgatgattgtgctggtgaatgtgtggtacgtgtaactatggaagatggcactgaatacatggcgagtggcccacttgagacgtattttgagatttactctgaagaattcaaatactttactgaggtagatttagtaaagcctcaacctactaacgaaggtataactttaggtgtaacaaaaatccattgtatcgtagatgaaaccaacgtcgacgaaatcatcaaacttttgcaaaaacttttaaaaagtagtgtacaatcagatagggttatgttatagtagccctatcaaatcaaaagtgaaggagaataaaatgagattgcaacgccagagcatcaaagattctgaagttagaggtaaatggtacttcaacatcgttggtaaagacgctgaactccttgaacaagctgaagaagagctttacgtgaaatgggttggaacgaagaatgtgatggatgtccactctacgaagatggtgaaagtgcaggattctggatttatcattctgacgtcgatcagtttaaagctgattggaaagttgttaagaaaaatctgaggaaataattatgaatgttgttgttgaatactctcaaggcgctgatgtaggatatgaagtttacacttcagttaatttagaccatccggatttggccgaattcattggtgacgcatttgatttgtctgggcgatacacaacaaaacctcgtgtttgtgttacaacatttgaccaaactgatggtttggaaattcagacagaactagtttcgtctaaatcacaaatccaaaaagttattaaaggacttaaaaatgcttaaattagtattcgcatgcgcaccgtctaaaacagttgatgataaactggaatatgcttttggattaggtgatggacttccatggaagcatatcaaacaagatatatgagtaactttgttgctcgcactaaaaacactgtaatgattatgggtgctaagacatttgcatcattacctcgtctactcccggatcgtactcatgtggttgtcactgatatggccagaaaactgcctaggactaaaaccaacgaacttgcgcatttctatatcacccaagcagaatttattactttggtaatgggtagtgaaattaacttgttcagcccttcaacagacgtaccgtttaaactttctactgaacatgttgatgtctcggttattggcggtcctgctttattaaaacaggcactgccttatgccgatgaaatcgtgatgactaaaatcattaagaaatgtcgtgttaattctgatgttcaacttgataaagatttcgtccaagatattatgcttcaacgttctatggtagaatctcattactacagaatcgatgaactcaccgaaattactgagagtgtatataaatgaaacaataccaatacctgattaaagatatcttagaaaatggctacgaaacagatgaccgtacaggtaccggaactattgccctgttcggaactaaattacgttgggatctgactaaaggattccctgcagtaacaactaagaaattagcatggaaagcttgtattgccgagttattgtggttcatgtccggttctactaatgttaatgaattacgtcttcgtactcatggtagtctaattgaaggtaaaactatttgggatgataattacgaaaatcaggcaaaagaccttggatatcatagcggcgaacttggtcctatatacggtaaacaatggcgtgatttcggtggtgtggatcaattagttgaaaccattgatcgtattaaaaattaccaactgatcgtcgtcaaattgtttctgcctggaatccggctgaaataaatcaaatggcacttcctccttgccatatgttctatcagttcaatgtgcgtaatggtcatcttgatttacaatggtatcagagaagtgttgatgttttcttgggcttgccattcaacattgcctcgtacgctgccttgactcatattgtagctaagatgtgtaatcttatcccgggtgatttagtgttctcaggcggcaacacgcatatctacagcaatcatgtcgagcaatgcaaagaagttttacgtcgtgagcctaaagagttgtgtgaacttaaaattgattggcctgaaggattctccgattggagcacgacattacagcttcattgggtaacagagcatatgaatccgagtgatttcattcttaaaaattacgaatcacatccagctatcaaagctaaaatggcggtataaaatgattttacgttttattaattcatatggcaccacaatttttgaaatgaaaaatccaagtgaactggatatcccttcaccgaatagtgaaatcacagttaaaggtgaacgattcatttgttattcacatgaacgaatttatgaatatcgtgaattttgtggtggttacggtatggaaaaagaaccgttggtttatttcgatattacagtcttgactcctaaagaatatgaagaaattattgctgaggataattaacgcttcagtttaaaagtgtataataaattaacgggataaatactatcccgtttggagtaatgattactaacctatgctgaggaatatatgcaagtaactaagagtagtggtgtaagccagaattttgatgcacaaaaattatccaagtcttaacttggcaatgtgaaggaacacaaatcgacccatatgaattgtacgaagaaattaagacccatcttgtcgatgggatgagcaccaaagatatccagaagatttgtattaaagttgcagctaacttgatttctgtcgaagaacctgactatcaatatgttgccgctaaaggattaatgtttgcacttcgtaaagatgtatatgggcagtttgaaccgcctgcttttatcgaccatatttcttactgtgttaatgaaggcaaatatgaccctgagctgttgtctcaatattcagcagaagaaatcatttatctcgattcacagattaaacatgaacgagactttgacctgacttatgctggtgctatgcagcttaaagaaaaatatctagttaaagataaaacaactgggaagatttatgaaactccacagtttgctatcatggctattggtatggccttacatcaagacgaaactcatgaccgtttgaaacatattattcgtttttacgatgccgtttctactcatcaagtttcattgccaaccccaattatggcaggtgctcgtactccaactcgccagttctctagttgtgtagttattgaagccggtgattcgttaaaatctattaacaaaacttcagcatcaattattgaatatatttctaaacgagctggtatcggtatcaacgttggtatgcttcgtgcagaaggttctaagatcggtatgggtgaagttcgacatacaggtgttattccatcttctggaaacatttccaaactgcagtaaaatcttgttctcaaggtggtattcgtggtggtgctgctacagcgtattatccgatgtggcacttagaagtagagaacctattagttctgaaaaataacaaaggcgtggatgaaaaccgtattcgacatatggactacggaattcagattaatgacctcatgatggaacgccttggtaaaaatgattatattactttatttagccctcacgaaatgtcaggcgaactatactactcgttctttgaagatcaagataaattccgtgaactttatgagaaagctgaaaaagacccaacaatcagaaagaaaagaatcaaagcactagaactctttgaattgttcatgactgaacgttctggtactgctcgaatttatccacagtttgttgataatacgaataactacactccgtttattcgtgaaaaagctccaattcgtcagagtaacttatgttgtgaaatcgctattccaactaaatgatgtgaatggtcctgatgctgaaattggtttatgcacgttatctgcttttgtattagataaatttgattggcaagaccaagataaaattaatgaacttgctgaagtacaagtacgtgcacttgataacctgttagactatcaagattatccggttccagaagctttaaaagctaaaaagcgtcgaaatctcggtgttggtgtgacgaactatgctgcatggttagcttccaactttgcttcatatgaagacgctaacgatttgactcatgaattgtttgagagattgcaatatggccttatcaaagcttcaatcaaactcgccaaagaaaaaggaccttgtgagtattattcagacactaaatggtctagaggcgaattacctatcgactggtacaataaaaagattgaccaaatcgcagccccgaactacgtctgtgactgggaagaacttcgagctgaactcaaagaacacggaattcgtaacagtacacttagagtttgctctcatgccatgcgaatcaagcagtcaagtctcaaatagcacaaacggtatagaaccacctcgtggacctgtaagtattaaagaatctaaagaaggcaacttccgtcaggttgttcctaatatcgaacataacatgagtctttacgactacgcgtggaaacttgctaagaaaggtaataaaccttatttgacccaagttgctatcatgttgaaatgggtgtgccaatctgcttctgctaatacttactatgacccggcagtatttgagaaaggtaaagtgccaatgtcggtaatgcttgacgatctgctttacttctggtactttggcggaaaaaacctctactatcataacactcgtgatgggtcaggtacagatgactatgaattagaaacacctaaagctgaagattgttctgcttgtaagctttaagacttttgattataatttactcatggatgagttaataactaagtgagaaatataatgagtacagtttttaacacacaacaagtcgatgttttgaatgaaccgatgttctttggttctggtcttggtcttgcacggtatgatattcagcgtcataaagttttcgaagaacttattgaaaagcaattgtcgtttttctggcgcccagaagaggtaaacttgatgttggactctgcgcagttcaataagcttcctcagttccaacaggacatctttacaaacaatcttaagtatcaatcattattagattctatccaaggcagggccccatctgcggtacttatggcacttatttctgacccttcattagatacgtgggttgcaacatggacattcagtgaaactattcactctcgttcatatactcatattatgcgaaatctttataccgatccatccaaagtatttgatgagattgtattagacgaagcaatcatgaaacgagctgaatcaataggtaaatattacgatgatgttctagttaaaactcgttattgggaaaacgctaaagctgatatcgaataccaaaaagaaattaatgcagacgaagacgttattgaagatgctattgggcatgagacatattggaagcgtgagctaatgaaatctctttatctctgtttgcatgttatcaacgccttagaagctatccgtttttatgtatcatttgcatgtactttcaacttccataaaaacatggaaattatggaaggtaatgcaaagattatgaagttcattgcccgtgacgaacaactccacctcaagggtactcaatatattattcgtcaacttcaatctggtactgacggtgatgagtgggttcaaattgctaaagaatgtgaacaagaagcagttgacatttttatggaagtaaatagtcaagagaaggaatgggctgcacacctctttaaagatggtacatgtccaggtatcaatacgcagagtatgtgcgcttttgttgattacttgactgtgtctcgtatgaaacagtgcggtttgccgtgcccaatcactgatgctccgaccaagcatccgtatccttggattcgtgaatatctgaactctgatttagttcaagcagctcctcaggaagttgaaatcagttcttatcttgtcgcacaaattgataatgatgtagaccaaaatgtaatcaattcatacaaaaaatatttctaaggacgggacttcggtcccactttattatgaaagatattgccgccgaatattcctttattaaatatatagaattggagctattagaagatgcaacaattaaaacagtcgatgtccctaataagaaaaatgtcatatacgctattgctatagatgacgaacttgtgtatattggcaaaaccaagaatttaaagaaacgcattaactattatcgaacagccataaatcgaaaagaccagacttcagattcaagaaaatcacttatgattttggatgccttaatgcaaggcaaaaggttgaattctgggcccgccaatgttttgacctttcagtcaccacaacgaacttggttcaatgaccatcgcaacaatggaccttgaagaaccactttttatcaaaaagttcaacccgccttggaatatccaacataagaaaaagtagtttacataccacaaggattgtggtacaattttaaaaactaactgaggatacaaaatggaaaagctttattataatctgttatctctgtgtaaatcgtcatctgatcgtaaatttttctactcagatgatgtaagtccaatcggtaaaaagtatcgaattttctcatataactttgcttcatattcagattggttactgcctgatgcgttagagtgtcgtggtattatgttcgaaatggatggtgaaactcctgtacgtattgcttctcgtccaatggaaaaattctttaatctaaatgagaacccgtttacattgtcaattgaccttgatgatgtaaaatatctgatgactaaagaagatggttcgttagtctcgacatatcttgatggtgggactggttcgtttcaaatctaaagggtcaatcaaatccgaccaggctgtatcggccacgagtattttgttagacattgaccataaaaacttggctgatcgtttgttagaactttgtaatgacgggttcactgctaacttcgaatacgttgctccaacaaataaaattgttttatcataccctgaaaaacgtttgattcttttgaatattcgcgataacaacacaggtgaatacatcgagtatgatgacatttatctagaccctgtttttcgtaaatatcttgtagaccgatttgaagtaccagaaggcgactggacatcagacgttaagtcttctacaaatattgaagggtatgtggccgtaatgaaagacgggtctcatttcaaattgaagactgattggtatgttgctcttcatacgactcgagactcaatctctagcccagaaaagttgtttcttgctatagtgaatggtgcttcagatgaccttaaagcgatgtatgcagatggacgagagttttcatttaaaaggtcgagctcttcgaaaaagcatatcttgatttcttagaccgctcattttatatctgtctagatacatacgacaagcacaaaggaaaagatcgtaaaacgtatgctatagaagctcaggctgtttgtaagggtgcacagacgccttggttatttggcatcattatgaatctttaccaaggtggttcaaaagagcaaatgatgactgctctagaatcggtctttattaaaaatcataaaaatttcatccctgaaggatattaatggtttacaaacaccaaggatggtgttactatggcttttatcaacaacacgaggagaaaattatgaatatgcaattgattactaacgatatggtcgtaaccgcttttggagacacaactgacggaatccgagtctttaagaaaggccgtgcagttggttatcttacggaccttcgtactactctagcgaaaaatgctaaaaagaaagtaaaacaaaagagtattccacccgatacgctgaagagaaacgtgaagcgatgccagaagcagttaatgctatggtagaatttcttcaaaacaatttgactaaatatgacgctaatgtgttcattaatattagtcaaccaaacgtacatatcgcaggtataaaattctacattatttgcgaccctcttaccgacaaattcaaccgcctcggaatttcaagtccgtatcatacagcagaagagttgtgtataatgtttgaggcctacaaaatccaaactgatgggcctaaaacagttcttatcaatggattatcccgagacgaaatcattgagattattcaaacatgcttaaagtaaatgcatcatatattgtagtggcagcttttgcggttgttgctactgtaacaatagcatttctgaaccataaagtcgattcgctgaatactgaattggcttctgttaaagagactgctaaaaacaatgctaaagtattagacgacttcaagattcaataatcagtctatagaagaaatgacatataagaatcgtgttttagttgaccaacttaaggctgaaaatgaaaagctccgtaaggattcgaagaagaagaacgtggtggcaagtaagccaggattggtcgaaaaacaaatcaacaggtcctttgattcctttgcagaagacctcaggaagctctcagaatgattaaattaaccgcagttgtattatctattggcattttggctggatgtgcccaggatgtgcccttaagccctaaagaaactttacatccgccgtggccagaatctattgttgaatataaccagaaatggcaagtaaaggttattgatggtaatccatgggttggaatgccatttgaagactctcaagaatttcgtatctggttaaacgacgtaaaaagatatgtacatgaccagaagactatgatatgttattatcgtagtggtttaaaagaggaaaaatgccaatgactaaagaacagcatgaatacattaaaggggcttatctatgaatctgaaatggcggctatgatttatgggcgccagattcaacgattagaatctttgcctccgactaatgaccgattgttagttcagtctcgtgctaatctgaaaaatgaatatcagaataagtgggcagtagcgactaaagctcttcacgagtatattgaatctttagtaaaatagtttacaaactctcaggagcagagtataatgctcctatggataattgaggaaatctaaatgaaaacattactagagaattacatcaaacggtctgatgagtatattgatatctgtcgtggaatgtcacttggcaattatgacaaagatgcagcaaaggcactagatgaagcaggtaaagctcttcgtaaagctgctaaagaaaaagggttggatttgcaacaactcaaaagtcatatgattaaatttatttcttcaaacgttagaagtatgtcaattaataaaaacgttgctgaaattaataaagaccggcgcgaactcaacattcgtattcttgaaactttcttaggaataaaataatggaccaagccaaaattgataagttaatccatacgcttgtagcagatatcaatacccgggctcttcgtaaatcacagattggtgagtcttggactatgcaagattgcaagaaaggtgctgaactaggacgtgaaattgctaaaattcttggtggacaatttgaatttgctgaagaggtagtaaaactgtgaaaaagattattttgactataggttgtccggggtctggtaaaagcacttgggctcgtgaatttattgctaagaatcctgggttctttaatatcaaccgcgacgattatcgtcaatccatcatgggccacgaagaacgtgacgagtacaaatacactaagaagaaagaaagcatcgtaacttatatgcaacacgatgcggcacatatgattctctgtcaagacggaactaagggtgttattatttctgacaccaacttaaatccttgaacgtcgtcttgtctgggaagaatatgctaagcagtggggccatgaaattgtatatcaagtgttcgatgttccatggaccgaattggttaaacgtaatgccatgcgcggcacaaaggccgttcctattgatgttctacgttcgatgtattctcgtatgcgtgaatacaaaggacttccggtttataaaggaactcctggtaaacctaaagcggttatcttcgaccttgacgggactttagctctacatgttgctcgtgggccttatgagttggataaactatccacagatgccccgaaccctatggttgtcgaatatgttaagatgcttcatcaggctgggtatacaattattactgtaagcggtcgtgaatccggaactaaagaagattcaatgtgttattacgaagcaactaaaaatggatggattcgttttctattccatgggaaatgcatattcaacgtaatcaaggtgacactcgtaaggacgatgttgttataggaagaactcttttggaactgtattgctccttattacgatgtgaaattggccgttgatgaccgtaaccaggttgtggaaatgtggcgtcgtattggtttagaatgttggcaagttaaccatggcgatttttaatgaaacgattatatgaagtgattgaggccatcgaacagcataaagaatatttgtttgtagcctggcctttagtaaatggacagttcggtattgatgtgctggactatgagcatgaagaacgtttggacggtggtatatttgataacgtcgaccaggcaattgaatggttaaatgaaaactatgtacgataaacatcatgaaatcgaagatgaagcatacaaaatgcttcgtaaactagtgggacttaatatgagtcctacattaatcaacaaactcgcaggaattcgtaatgacctgaatactcgatacaaaggcgaatatcatgtagagtttgttcctgtaggtgaaccaaccgagcgatttgttgttcgagttaaagtaaatactgtgcactgaggtaattatgttccctaaatattctgaaattgtaaaggtagtttttagccagattattgcaaatcatttctttgataagctggatactgctactgagcttaaggtccactctgaactactctacgttttgaatacgctagtgcctgaccaagtggattctgtgtctgttacattgttgcccagctctgctcatgtgattgttgtgtttggacttgacgctgatctagtaattcagtgtgaagttgatttcgattcacaagaaattaaatgttttgcaatttaagtttacaacatggtggagttgtgatactataactctaccaacaaatgaggaaatcgaaatgctaagtgaaaatccaattacagtacacgaatttcagattaaagtaaaagaatttgctcaagcactcatcaataaagtgtctgaacgtttccaggatgcaacattacgagttattcaagaatctccacgttcttcttttctcataatcgttaatcctaaagatggtgaccaaattactaatcttaaattaggcagtgatggtcttgttgaagcaactcgagtatatggaacactataatgagagctatctcattactatcgagaatggtcataaatctgagcactaccaacttagcctgtctaatccggttaaaggtattgttgaatcagaatctgtttatatctcctaaggattgttatgttacctgtcgtcggaaaacttatttctccaaaagaactggctgagattattcctttgtcggaatcttacgcatcacaagtggcttctcatcgcgaacaagttaattcgattatgaacggtgaagacccacgcaaacttattgttgtaggtccttgttcaattcatgaccctattgctgctgttgaatacggcaaacgtctggctgaacttcaaactcgtcttcctaatgttctgttagtgatgcgcgtttattttgaaaagcctcgaactaccgtaggttggaaaggtcttgtaaatgatccatatcttgacggaagttttgatatgaaccacggtcttatagttgcacgaacattgtgtcgtaaacttctacgtatgggacttccattagcaactgaagtattagacccattcacgattaagtatctttctggtattttctcatgggttgctattggcgcccgtacgactgaaagtcagacacatcgtgaaattgcttcaggtctaccgatgtgcgtaggcttcaagaacgcaaccaatggttctattaaagtagctacagacgcgatgtatagtgccgcctggcctcatcggtatatgggtatggacgtcgatggtactgtaggcattgttgaagctgaaggtaatcagaatacgcatatcgtattgcgtggcgggaccaacggcccgaactatcattcttctgatattcaagaagcttctaacaaagcaagggcagtaggtctgaatcattatgtaatggttgactgtagccagccatgcaaacgctgatgggcattatagcaatcaaattggtattggtaaaaatttagcagctaatgatttggtcaaaggaattatgatagaatcgttcctacatgaaggaaatcaaaaaatttctgataatatgtcctatggcgtttccgttaccgatgcgtgcatcagttgggaacaaactaaagagctgttaacttatattaataaggttcaataatgaaagctagcacataccttcagattgcatatctgatttctcaagaatcaaaatgttgttcatggaaagttggtgccgtcattgaaaaagatggacgcattatctctactggatataacggttcacctgcaggtggcgttaactgttgcgaacatgcatctgaaaatggttggttgaagaataaaccaatcccagtcatcgttgctggacataaagaaggcactacagcatttggacgggtagataattttgttttagccaaagaacatcgagctgctcatagtgcatggtctgctaataatgaaatccatgcagaattgaatgcaattttgtttgccgctcgtaaaggtaattctattgaaggtgctacgttatatacgacgctttctccatgtcctgattgtactaaagctattacgcagtcaggtattaaaaaggtcgtatacgcagaattatacgaccgatctcctgaaaattgggcagatattctaaaacaagctggtattgaagtaattcagtactctcgtaataatcttcgttctctgaattgggaacaaattcgaaacttttgtggtgaataatatgattttaactgaacaagaaactatggttcttcgtgaacgtattaaaactattttgtctgtaggcgttcattgtgttgtatttgaaaaggctaacggtgatgttcgtacgatgtttgcctcccgcgatgaacttgaagtcaaatatgaaaataacaatccggcaacagaagttcgttatgaacctcgtgaatcagttcgagcattcgataccaagttaggtcagtggcgttctttccgccttgataaagtaatttcggttgatggtactccggtcgaacgtttgcttcttatgtaatatgctttacgaatagtatggtattattaatctatcgtcaaacaacaaggaaataagatgtctgaagtacaactcccaattcgtgctgttggtgaatatgtcattctggtttctgaacccgctcaagcaggtgatgaagaagttaccgaatcaggacttgtgattggtaaacgtgttcaaggtgaagttcctgaactatgtgtagttcattctgtaggtcctgatgttcctgaaggttttgttgaagtcggtgatttgactccactaccagttggacaaattcgaaatgttccacatccatttgtggctttgggacttaaacaacctaaagaaattaaacagaaattcgtaacatgccactataaagctattccgtgtctttataagtgatataaataactatatgaagagaacactcttctaagcggtagcctacaactgagagacttgtcgaaagaaggtgaaattcagaagaacgtggctactaaatattatctcgaattgagaatttaaaatgattaaacaattacaacacgctcttgaactgcaacgcaacgcatggaataatggtcacgaaaactacggcgcttcaattgatgttgaagccgaagcactggaaatcctgcgatatttcaaacatctgaatcctgctcaggctactctggctgctgaactggaagcaaaagatgaactgaaatatgctaagcctctggcttctgccgcacgtaaagcggttcgtcattttgttattaccctgaagtaagttaaatcgaggagccgtcgaattgtctgattatcgatttgcgaatcggtatgttttagaagtaccgccccgacaattttacggtgtacctcttgaatgtattttgtactatcacgcgtcagaaaagggttatctgtttaagtcgtggttggtatgatgacgaggtttatggttatcctgtcgttaaatatccaaaacctatgttcccttgaggacttgcgcaggcaatgtcaataagtcctgcattttcatttaaagagaatttataatggcaaaacaagctaaagcaaagaaagcagttgaaaagaaagttgatggtacctctaaacgcgctggatacaagcgtgggtcgaactctcgtattaatcaaacagttgagaagatcatgcgcagagcacgtgcagttcttcgagatgatgcttctcgttttggaaaggttgttgcataattttagggagacttcggtctcccttttgtgcgtttagggcaaaaaagtttaaaaagatgtttactctcctgtaggatgtgttactatagacttgtaccacctaatcaataaaacaacctggagaacaaaatgaaaatcaatctgaactcatacatcaaatgtaaagaccacgatggttataaagctatcgaaattaaagaattccagtggatgttatacaaagagcaatttgagatcgtaagttgtatgacccctgaaggtccttctgatgatttctcttggaaaattgtgttagcaaactttttcacgggtgacacatacgaattaaaaactattattaccggtaaaattcgctcagaaacatatgttgacgaagaaactggttactctgaagatgttacatggtatcaaaatggacgcattacagcagataacctgatcgaaaaatgaaagccaaaggtgttttaaatttagacaattggattaaagttgcataaaacagtttactttggtacaggttatgttattatagacctgtaccaacaaacaacttaaacatccggagaataaaatgaactacaccaacttcgaacgtaaatatgtttctaacggtattgctggttcttctgaagttatttgcttatggaaacacgaaaacggtacagtttgtgaaatagaacagtgcatgaactcctaattacgtttatatgcgatttgaaaatggtatcacggtttcaatcacgatggaaggttcaaattttaaaattgcattagatgatgatttccgtcagcgtgatttaggtactcatccttgctggaatggtgttaatcgtaaacttctggttaaaacctggattcgtcatatcctgagtaaccgagctaaacctgaacatctcgaagcaatctttgatgtagttcttaatgaattcgatatctaatttaactgggagcttcggctcccactgaggaaattatgtttaaagttaatactttttataaaatgaattttaaaaatggggatattactccacgccttaaaaacatgttctcatatgaccttatcgagccttttgaagttttagaagttactgatgccggctcagtttgtgaaattagaacttctgaaggtaaaatttatcaggcaggtgttggtaaattcagtaattgttttactttaatattctcgaccggatttagacgagcattttattgaatgtcctaaccctaaggtccatgaagttccacatcaagaaattaagaaaaatggcccgcacgaatatacgaaggttgaaactcctcatggcgtgatgtggcgtcataactctcctttcggaagtaaaggaacatttgctcaaccgtctaaatcttatgacgatgaaaaatacatcgtcgtctttttatctgaacagggtactcaagaccgtggatgccaacgaagtggtttactaagtgaacttgaagctcataaccaagcacgtgaattcgttgagaaaaatcctggttctgaagctctagtcatgaaagcaattactcaatatatcactgctcaacctgttgttcatccggtagaaattaatttcgttaagtagtttacatccaaggacggattagagtataatgatttctttagtaagtggaaaaatatgaaatttttaatagcacaaacagtccaattaaaaggtgttggaattcctggggtgatttttaaagttctcctgaatttaaaaccggcgctggaattatcaatgaagcgtatgctgttcaatgggttgattggacttctgacatacgtatgggtaaagagttatctcctattaaagggttgaaacatgttgaataaattaatccagaaattgtttggtacggaaatgattgaagttacttatcgtgtaacagacgtttttccgtattatgcagaaaaccgtttagaaccatacgttacgtcaattaaaatgcctaaaaatgacggaaatttatctatcgaagaccgtatacccggatatggtcattgggctgatgttgaaattataagtgttaaagatgtctgaattagaaataagaagtaatttcaagtggccgtcatgtgcattaagtaactttgctcaatggccttttgttatggacggtattcaattcggaggtcttgaagggtttctccaaggatgtaaggtgaaaaatgttgaacaacaaaagacgtatatttggactatccgggcttgccgcccaacaagctggaaggtcttatgcaagagctcaggaccgtgggaccctcttctggttgggagttccattttcaagatactctgaagcgtggaaagaattatacacaaatgcatattttgaagccgcgatccaaaataaggggtttcgtgatgccttacaagcctctaaaggaaaaattttgaagcatagcatggccagccacctaacaaaagatgatacaatactaactgaagctgaatttattgatgtgttaaacctattaagagactctttatgaagcctactattttgactgatattgatggtgtatgtttaagttggcaatctggacttccttattttgcccaaaaatataatcttccattagaacatattttaaaaatgattcaggacgaaaaatttatttctcctggtaaactgttcaataccgatgataaccttggtaaacaattaatagaaaaatataatagctctgattttattcgttacttagcgccttattcggatgctcttcgagttatcaataaattaaaagaagactataattttgtagccgtgacggcgctaggtgattcaattgatgctcgattgaatagacaatttaatttgaatgctttgttcccaggcgctttctctgaagtaatgatgtgtggtcatgattcttcaaaggaacaattattcgaactagctaaaacaaaatataacgtgatttgttatgttgacgatttagctcatcactgtgatcatgcggcagaaattcttaatgtaccgatttattggttggctcgtggtgaacgtgatgatattcctcgcactgcacaacgtgtacacacatgggatgatattgaatctcgtttggttccacccgagcgtaattcagattcagatcgtgaagaccttttaaaacgattggcggatttgcttaaagaatctggtgcaacaagtccaggtgcatggcctaatcaaattggtggcccctcgacaacacgtactccatatacctggcgaaccccaggaccaactgatatgcagccgtggtggacgattcaaaactttcctttagattcgtctaaatggacttggtctataaattgttaagggatacttatgtttgtagttcatgatattacagatggcaaaaacaccacacgtgactacggtcacgttaacatgttctttcgagactggccattgtttcgttcagtaaaagacgcagaaatatttaaagagtgtgttgaacaagggttcatctacatttcagaatactatgttgaaggactcggtaaatggattaccacttatcagaaaacgctgaaatcgcttctagatgaagtggcttataatagaaccgtaaccaaaatcgaggacatcaaatgattttagatattttaaaccaaatagctgcgatcggttctactaaaacaaaacaagaaatccttaagaaaaataaggacaacaaattacttgaacgtgtgtatcgtttaacatatgcacgtggtatccagtattatattaagaaatggccaggaccaggtgaaaggtctcaagcgtatggtcttcttgaattagatgacatgttggattttattgagttcacattagccactcgtaaactcactggtaatgctgcaattaaagagctcatgggttatatcgctgacggtaaacctgatgatgtagaagtactacgccgtgtaatgatgcgagaccttgaagtaggtgcttcagtgtctatcgcgaataaggtgtggcctggacttattcaattgcaaccacagatgttagcatctgcatatgacgagaaattgattactaaaaatattaaatggcctgcatttgctcaattaaaagcagatggtgctcgttgtttcgctgaagttcgcgatgatggcgttcaattcttttctcgtgccggtaacgaataccatggtcttactctattagcggatgaactaatggaaatgactaaaaagaagctcgtgaaagacaccctaatggggttttaatcgacggtgaattagtttatcattcattcgatattaaaaaggctgtgagctcaggaaatgacctgtcgttcttatttggtgataatgaagaatccgaagaagtacaagttgcagaccgtagcacttcaaatggtttagcaaataaatctcttcaagggactatttctcctaaagaagcggaaggtatggttcttcaagcctgggactatgttcctttagatgaagtctattctgatggcaaaattaaaggtcagaaatacgatgttcgttttgctgctcttgaaaatatggctgaaggctttaagcgaattgaaccaattgaaaatcagttagttcgtaatcttgacgaagctaaagtggtttataaaaatatgttgaccaaggtcttgaaggtattatccttaaaaaccgtgattcatattgggaaaacaaacgctctaagaacctaattaaatttaaagaagttattgatatcgctttagaagttgtaggatactatgaacattctaaagaccctaacaaattaggtggtgtcgaactcgtatcacgttgtcgtcgtattacaaccgattgtggttcaggttttaaagatacaactcataaaacagttgacggcgtaaaggttcttattcctttagacgagcgtcatgatttagaccgtgaaagattaatgtccgaagctcgtgaaggtaaattaatcggacgtatcgctgattgcgaatgtaatggttgggttcattctaaaggccgtgaaggcactgtaggtattttccttccaattattaaagggttccgttttgataaaacagaagcggattcatttgaagacgtatttggaccgtggtcccagacaggtttataatgaaagcttatttagaaacagttattgtagctaagaaggatggtggagatgtttccacctcttgctctcagattatattagattttcctaataacgattcctcctatcatatttttatggacaattttgataagtacgaaaaaggccctaattttgaagtttatcgtactttgctcccgattgtggattaagagccttcgggctctttttggcataaatataaattattactaaaaggaaaacactatgtctgaacaattaaatgaagtgtttgaatctgaaggcagtcttcctgtcgtcaatttgaaccctaaagctaaagttccacaagtctggaaaattggtgatatcgatacaaacatcgtagttcgtttattctcttacctttccgaaggcgacgctgtaaaacaagttaaacttggcgacaaatatgctcatgttgttattatgagtctgtctgaaaagggtaatctcgctgaattgaaaaatggccttggtcctgctcctattgatgcaatcaacaccattttcaatacggtatatgagcaggttaaagctcttcgtatggatgcagttctgttccggttccctaccaagaaattgaaaggacgtggacaacaacttcaaactcttcttgctcgtttagtttctactaaaaccggtggtcgttttaaagtattgtcggcaatgtatcaattcacaggtaaacacacctatgtgatgatggttcgtaaaaatgccaacattgaggatattaaaggcatccctaacattaacacagagttgtacacgaaagtagattctgatgttggcgaagtttatgtgagtaaaaagaccggtgaaaaggtcaccaaagaaacggctatcgctggttctattgccgcggtagaagaaaaacgtaaagataagcctgttattgctcgcaccaaaatttctcgtcgtgctattgcagcaagtcaatctttagaagctgaccgccaagaaggtgagttattccagaaatacgaaaattctgctaaagaagttagtggcccagctacagctgaattacttcctgaagcatatgaaatcgtactagcccaagcatcgtccacagcaaaaggcactttagttgctgatatcgaaaataagatttataatcgtattgatgaatcctttaaatttgccgatgaagtttcttatggtagtgttattaagccgactttagaaaagtttgctaagaaaattaaaaccgaaaaacaacatctgttaaagcattagctgcttttgttgaagctgcaaatgaaattgcagactctattaaagacgaatggtttgaagattttagacgtgataatttccaactgcctgacgacgttttagctgaagtatctgaaagaacttggaaacaacgtaaatcagcgttcttgtctaatgtgatgtatacttatgcacgagaatcggctagaggcacctttaatataacaatgaatcgggaccctaaacaatactctgttgctgaaaaacgagctattcgtgaatatgcctcttctgcgtataccgatatcaataatatgttgttaggtcgttataaaccagatttttacgatgttgcagatgaagatgaagttaaacgcgctattgatggtcttgattcagcgtttttaaatggagaccgtttacctgaaggactaacgttatatagagctcagtctatcagaatgcctatttacgaagcaatggttaaaaataaggtattctacttcagaaactatgtttccacttcactagctcctattattttcggtgggtttaaagagaacgttgccattggacttgctcctgaagaagttcgcaaagagcttaacattgataataatgacgaaggtgttactatttctcctagtcaagtaagaacagctatgcatgcaccagaccaaatccgtgttaacgttggatgggctattgatggcgcccataaagttaacgtgatttatcctggacagttgagtaatcaccctaacgagcaagaaattattttgcctagaggtattctcttgcagataaataaaattacagatgcgtcatctgacactggtgcaggtttagaatccaaccttaaatttattcaagctgaagtcatgtcctcggaccagttggacgaagctgtcatttacgacggtgatgttctcatggaaacaggcgaggtggttgctatgacgggtgaaatcgaatcagatgagctggtatcgttctccacgtttgtagaaaaactagtgctcctaaaggattgaaattgttagcatctttaatggatttagaatcagttccgtttaaatttgtccaaggatagtttacaaacacatgaatgtgtgatactatcatcccatcaacaacatgaggaaaacgttatgaaatctatgcttcgctttaatggtcaagaactagtagttgaagatgttatcccagcggatgatgtttttaacgaagctgtgattgacgaattgaatcgagtattcccaggtgcattccatattgctatggaacctcttaaaaactttcgtgaccctgagcacactgatcaaatttttgtcggtgtagtgacaggtcatttagaaacagaggtaccaatggtcgtattagttaaatactctaaagatgatactccattccgagcaccagcattcctttcattccgtaaataaacccctaaagggagacaacgtctccctttttcttatagtcctaaaactcttgacgcagaattcaccacacctgtcaatgtgtttatattagacacaccaccagcagtcccacctaatctagaaagtcttgatactgcacttcctagtccagaatcattctgattatttccaaacattcctgaaacactactaataagtcctgattcaagccattctaaagcagcctgtctatttacagcacctgattgcataacgcgataagcaaatgttacgtcaaaaactgttatctgattatcaccatcatacgttaactcaggagaagagacgctaacaggaatacatccagtgaacatgacagctgtatgtggtaaaccatttcgtgcatgtaaattaacctgaatatctgcttcgacgtcttgtggtaaagcacgaagacctgttacagggtcttggactgagtttacccagtcttgcattgctctaaagttagatgcttcggaatccattctaaagcttattactaacgggtccatttcacggccggtaattcggatgttcggagagttatagttgaaatctgtttcatacgataatcggttctcaggcatttttacagaataaatcattaaacctgtattattatatgccatattgaagaagtctatcagataagctcctaccgtgaactcacctaacaagctttgtaccgtacgttggctcattgctccaatcagatatttacttatacctgattttcgaattaatttctgtgttcctgccgtaatcagggttgttacgccctgattgatatcaccttgagttaatcctaaccaatcagaatccaaccctaagttattataagcaaaactaccaattgacgaaattagtgaagatgatttagtcgatggtgtagtagcaaatacacaactaaacatattgtttcgttggaaatctgcatttatagcttggttattaaattcttctaaagagtacattagaaagtccccgcataaagtgaagaacggtttaatgtaataatttctcgcattgttatctctaacgtaaatgttgacggtaagttaggagcaacagcaagaccattaaattgtccatttggagttttatcaaaacgtacgctttgaatttgacatgggccaaatacatcagttaacccgtcaaatttagatgtataaccaaagtttttaaccatccaaattgtagggttgcttacaactaatacgtttgttaatgacgcagtaatcttttcaaataatgtcttattttttactgcatcatctggtgtcataggctcaataaacgttgaacggtaccattcgtctaaataacttttaatctcttgggcatactgtgatttaccggtctcaccatatgagaaatagttaaaatactggtaaatagtttataatagccataaggtcttcagttgaacgcggagttaaatcccatgtaaagactttagtacggttctcagcaccaccatacatactacgagaagtcgtataaatctgttcgttattatcggccataagcccttgagtaatagaatctaatgcaccaaaaactgcagtagaagcaatgttacttaaaacacctgtagcagtacctccacctttagtaataaggctatcaccgatatcattaaaacgatgcgaagttgtatcaacgtcagatttggaacgtggcaaaagtatattagcaacaggagttttatttatagtaggcttattagctccggcaggaagcaatccatttgagaatttagtcactgcatctttcacgttatcagttaaatctgatatgataccattagatgaagtcccggcgtatgccggacgtaaattcctgagggatcctgaatcgcgtgcagacatattgtacgcggtaaataataatccattcttataaaggtctgttacctggaagtctcctgtggagtcatttccggctgctcttcctgtaggaaattgagcaacataagttttagtagttgtttcggttttagtgctttgcccagcactttctgcgactgggattgctttatttaaatcctttgcatctactactatttcttttacactaatcataataatccttaattaacaccggtggcatggaaaattccaggagccgttgtacttgttacaggggtcatattctggactacggtattctttttgacgacattatttgtgttactaatcgccgctaccggttgctgttgtttagattcagaagcacgtcctttctctattgactgaacttgttttgcttctggagatttagtcgaagattcaggcttaactgttgtctgagcctttttggcttcagccattttattatttagcttttcaaatctagcatctaattcctttttaacaacaggagttttattaagttcagggtctttaataagcttacttaaatcagcataagacttctcgacgtttttagcattttccggattagtcatatcgattttatcgatataatcctcaaatctaactagtgcagcacgagtttcattagcttttatatatgcctctttacgctcctcttcaggtagctcttttaattttgctgattccgcagcacgctcatcgcttgtactaaactcttctttattgtcattaccacgaacccagttagtaacgaatgttttgccgcgttgtaacatatcaagacctttagaaacggttcctaattcccggtcgtcacgcttcatttgatatttagcgactttctcttggtcttctttctttaatttgttcccagtagtttcttggaatccttctaaagcacgtccttctatttcgtccgctgtatcgccaaaacctatagcacgcaatatagacgcggagagtttagccattcctaattgaattagttcacctaagttcattaatgctgttcctacacctttgacaatagcaacggttaaaccaccccagtctccagcttcccacaattgttttatcgagtcaatagaagtgaatatatcacttaagaatttaccccactctttagcttcatcagagaatttagtaaagttttcatcaaataaatcccatgcagaagtgaacttgtctgtccaatatttgaaatggactatcaataaatcaataccgataacaataccaagaataagtgcagccatttttgctgcttcaatagcagccgttatagtgtatttgaaaagcattccagcaattctgtctgaaatggatattgatttattaaacccggcttgaactgttttggtgagcattgcaattttatcgctcaatttaaagctaattccgcctttagaatcggaagtagaattagcactttcttgaaccggggctgggaagaaatcttcgtctggcttattatcaatcttttcaggtgtaggtaatgctttaaacaactcatcataagtttcattatcaaccactttaacaggtattgcgttctcaattacttcaagagaggtgcctcctgtattttgaatatcggtagatgtttgtaattttgctctaataatgtagctaatcggtctaacttggagcttattgcactagaaacttcgtttatacttttagtgacttcagtttgtttttcaataacttctgcgataagctctgtgccttcagcagtattatctgtagaattctttaagtctccaattgattcaataattccattgcctttatcttctacactttgcgatgtgagttcagacgcggcttggacatcgtctagttttgatgaaatatcattcattgcttctaatgaatcggtagctgctgttgcagctactttttgtggtttattatcggcaatgaccttatttctacgcatggatttcatttcttcaggtttcattcaagcaatccaataatttctgctatacccttaaatagggccattagggcctggaatagcaatagttgtcgaaaggtcttctgcccatttgattacaaaagcaggcatctcaaggaaagaaatttctttctcttcgtcattaacttttattaagcaatttgataacatttcactgattgtggcgaattgttcaaatttgcctggaggtctaaaataaaaagtattgccttggaattggaattctgttcgttggcatacatagacgtcatctagtttataagtgaatccatctttttcaacttcagacttaagtttgttattaaattccaatatgtgtagacatgcaaaatcaaaatctgcgggactcatatttttacaaatagaatcagctaagattttcatgttttcatcagggcctttaacgtcctttaaaagattataatgtttgagccctaatttaggaatcattaccttttattagactgtggtagaattattttctttagaggtagaatcagatttaagttcatttttaaccttaactgggttaacaggttctaacaccattgagttggtaaacatgtatagatgagtttgtgagttgttatttgataactcatgaataacttcatccacgtaaaattcggatttgaattggttcttttggtcaacaaatataattttagtagcaggcgttatgttaaaattacctgtagtagtgcatttagcatatccgtcatattgagccattgtctgaagacgacttgcttcttcaaatccattacgataggtcatttcagaatatccaccagatcttgacacaagaatagcattatcaccatcacctgtaacaataaccggaatagatgtatctaaaaatgaatgggcgaatattgtggcgtttttaatagggtctcttgtaaattggttggctttagtcatccaggtaaaatcccatactaatggatactcaagctcttgaatatactgacctacagtatttggctcacctacaatcatcttaatgccttctttgaccaataagagtatcgtagtcaatcatgtttacgcctaaaatatcttgccatacgaatacgaacttatcactcgctgtagcaagtcctaattctctgacatatgccaaataatcatcaaatgtgcttgtccaaggaatatcaggaacataagcattaatagtgtttattggcggagtaattaacgtacggtctttgtatatgacacctaacatttcacgtatagattcgcctgcgtctgggaagaatggacgcccaaatttaaggttctctatagaatgtattgttccaagctcaattgcaataatattgtcgccttttgagtccacagacacagaataatgtctacatccgtaaattcgagttctaacttggagaggtgtgtttgaatttgaaacagagatttgaactatctgtctaccgtccattttagtgtggatgtttttagtgtcataaaattgaagaatcccttcatttcttccatatagcgaatctcgcatagttaaagttgttattgttgccgcgagttcaacgtatctattttcttgccaagccgaataatcttgatataatttaacgcttaagttaggatatcctggacgttggaatactgtcatttttatggtccttttctactaatgttaaagcaataccacgttcaacaggaatcatttgcataatagaatccaatgtgtattgactctttactagtgaatggtttatctgatagaatgtaaaaatctcatcagggttaactaacaatttaaaaacctctaagatatcagtatatgttttaacatggcgttcacaacaacctaatctaagggtcaaattaatagggttcatagaagcaataaccttctcgagagagtcaatgtctattgcttctattacttggatttggttctcttcagtcaaatcattccatgggtaccattcatcattataatatatttcttttatgttttcacttatcattaatgctttattgtcataaaaacttttcagggaaagaaaaacgtatttttataccagcaacatcaagttcaggttcgactagttcttttgatatatctcaaatggtgcagttttttctttagagcatttagggcaagtgaaaataacgggaacttttgttttgcctatagagcctgcaaaaacttgtaggaatataaatggttgccatgttttagggtactcgccaaaataatcatcaatcagatcggcaattatttctttttgttcttgcggcgaacgatgttcgatatcatttctaactagtaaaagtctctataatccgccacagtgaacggcttaaaacgatgaacaccatccggtaatttacaacgaattatattagccataattactccttttctattatttataaatacacaataaaggagttaacatgtacaaatatacgtttaccgtacgtttaggcgataaagaagtgaattgtagagcctttactttaaaagaatatttaggactcataggtgcgcgggctaccggtactattgaatcagcagtgaataatattatcactaattgctctaatgctaaaaacttgactaaacaagaagcagagttattgttggtaaatctgtgggcacattcattaggtgaagtgaatcaagaacacacctggaattgttcctgtggacattcatttcaagtctatatgaatttattgcacactcaattagatgaacaggccgatccctggtattcgttcagtggtattaaaattaaattccgtcaacctaaattatttgatgataaaaatatcgcattaatgattgcttcatgtattgaggctgtttttgtcaatggagagtccatccctgttgaagatttaactgaagcagaaataaacgacctttacggccttataacagaagatgacatgatcaatattaaaaatcttttggtatcgccatcaatttatctggcaacccctattaaatgtcccaaatgtggggcgtcacatgttcacacaatacgaggcctcaaagaattctttgagttactataatgtctaatatcaataaactttattcagatatcgacccagaaatgcgtatggattggaacaaggacgttgctcgttctgtaggacttcgttctattaaaaatagtcttcttggcatagtgacaactagaaaaggctcacgccccttcgaccctgaatttggatgcgatttggttgatgaacttttcgagaacatgacaccacttacagccgatacgattgagcgtaatatccaggcagctgttcgtaactatgagccacgcatcgacaaactttctgtaagcgtaacgccggtatatgatgactatacagttatagtagagattagattttcggttgtagacaaccctgacgatattgaacaaattaaacttcagttagcgtcaagcaatagagtgtaatgcttcaaggcaacctatgtataatggttttaggtccttccgatacagccgggagattattagttaaaagagagaacattatgaagctggaagatttacaggaagagttagacgcagacttagctattgatacgacaaagttgcaatatgagacggcgaataatgttaagttatacagcaaatggctacgtaagcactcatttattcgtaaagaaatgttgcgtatagagactcagaagaaaactgctctaaaagcaagattagactactactcgggacgaggtgacggtgatgaattcagtatggaccgatatgagaaatctgaaatgaaaactgtcctggccgcagataaagatgtgcttaaaatagagactactttacaatattggggaattttacttgagttctgtagtggtgcacttgatgcagttaagtctcgtagttttgcacttaaacatatccaggatatgcgagaatttgaagcggggcaataatgcgttattcaattgaagatgcctttaataatgatgaagaatttgaaactgaaattaaattcttaatgggaaaagtatcgtctacgacgtcaggatattcgtatcctggcagaccacccttgtggtgaagacgtcctttatattaaagggaagtttgctgggtacatcgacgagtatttttatacaaaagatatgggtatcgatatgtgcatgcgagtggtataaatagatatgtaatttcaacttaggaggcaatcatgtcagataagatttgtgttgtctgtaaaactccaatcgattctgcattggttgttgaaacagacaaaggtccagcacatcctggtccttgttataattatgtccaacaattgccggtttcagaaagttcagaagagcaattgaacgaaacccaacttttactatagtgttaccttttttgcctatggttttggcccttccaaaaggtcgggcctttttaattagaagtcttcttcctcatcctcatcatcgtcgccttcaagttcggcacgcttacctgctaaggcatccctgacagaaatatcatctgtatcttttaattccgtttcttttatacgtttcttataataagcttccaattcttcaagcccttctaaggtatgacaactagcaattttacccatgaattcgtcaatagatgcttcgtataaaaattgtttaaattcaagtaccatttttatctcctaagggccgaagcccttataaattaattgttttcattacatagttaaatttctcatcagcgtaacgttggatacgatcaataccgtgttttaacaagtaattaagatgagtatacttctttttagtatttaatgatttaggttttacacctgcgtcatcgatgagatcccaaactgtagcaacagctttagaaccatgcttacgaagcacgcgacctacggtttgaagtacgataatttttgatttaacaccatgggcaaaaataacatgatgaagattcttgactgaaataccagtagagaatactccatatgatgcgacaataataatgcctttaccattttctgccatgactttaagcgcgttacgtgtttcagtatcaacttcacctgatacgtaataaactttttcgtatccaagctctttaatagcttcaaatatttctttaccgtgtgtaacgtgtttaaacattacaaaggcgttctcgtctttcttggccaatttgactgaaagttgagcaatccactttgtacgacgttttagtccggtaataattttaacttcttcttggtatgttttaccttttaatttggtggcgaattcgtctggataacgaaggaaaatactattaatcttaagctcagttacctgtccgtcttccattaatttagacgtgctaacaggacggaagatttcgccgaacatacctacgtactgcattacattggcttttccgtctcttaatgagccagataaaccgaatttaaacatgcaattatttaatcctgagatgattgaagaaatacttttgcctgttgctaagtggcattcatcgttcatcatcataccgaactgagagaaccattctttaggctgcttaactaccgtttgccatgtgccaacaataattggagcgtcgtttttagatttgtccgctttatcagcaccaccgccaattttcttaatcatcgaatgactaaacaagcgataatcaacaaaatcattagccatctgggttgtcaatgctgttgtagggacgataatgagaattttaccttcatagttctctagataataccgagctaaaagtgcttggattagtgatttacctgctgatgtcggaaggtttaaaattcgacgacgattaactagtccttcatatactgcatctttttgataccaatgtggttcgattttggtgttgcctgaataaatttcttgtttagaaagccacgcgtcaaaatcttccctagtaaggtcttcggtctcaaagattttagggtcaatccatacagaataactcatattgttacagaactttttatttgtcctacaagtccatatgggtaacaaacgattgtaatctaaaagtcgaattctaccatcccattgcccatagcgatattttgggttaaatttatacccgtcagcttcaaagctaaaaagtcacgaagttcgtaaaacgtactttcatcgcattcaatgcgcacgtgactaaaatcataaaaatgtactttaatgtcagtcatgtcaaattaccatgtaataaatata

SEQ ID NO: 4 - DNA, 1208 bp, Escherichia coli phage ECCR-664
  source 1..1208: mol_type = genomic DNA
tgtcagaggttattcagggctgccgcctcaggtgcaggctgttgtgctcgacctgtgggttaatcttctggatgtgccgcagaaacaggagtttgttgagcgtattcgtgctgcgctggggacgccaaaatcaccggatgaaatgacgccggaagaacaggaagtagcggcacaacaacaggcacttcagcaacaacaggcagaactccagatgcgcgagatggctggcagagtggcaaaactggaagctgacgccgccagggcacatgcagctgcacaacgggataatgccagtgcacagcgggaagtcgccctgacacaggggcagcgttatgtggatgcgcttaaccaggcacatacggcagaaatcattaccggcgtacagaatatggaacaggagcaggacgttcttcagcaacagatgctgtatacgttacaacagcggatgaatgaaatgtcgctctgaaaactctggcttcaactgaaccccgtcatcgtacggggtttttgtttccgaggtaagcgttccgggagcggtgcgcttattcgcggggcagcgataagccttatttactcaaccattcggatctgtccgataaacagaccatgcggagttatttatggattttggaatttacgggtgaagaaaccccggaacaactggaaaaatgctggaaggacttggggatgtggatattgacagtcacgcacaggacgtcgtgacggaagataccacggaaaaacatgcggatgaggaagcacagactcagacgggcgataacaatgtggcaccgacgccggatgccagtgtggagcagacgcaggacgtgaaggagccggaagcgaaggggtgctcacccgcgacggtaaacacgtcattccctatgaagtccttgaggctgaacgttccggtaagcaacggccgaacaggaagccgcacttcttcgtgggcagatagctgaagaaaaacgcagggtggaactgctgacgtctcagatccaccaggccggtatgaaagcccacaccgttaccggaaaacgaaaaatttctgatgagcagattgcccgtatcaggagatgtatccggaaattggtgacgcggtggcttcgctcatccgtaaaaataactatctccagtcccgtgttcagcaatcagcacagcaggcagaaggtaatggtggtgaggatttatcaccggttcttgatgcg

SEQ ID NO: 5 - DNA, 88695 bp, Escherichia coli phage ECML-1
  source 1..88695: mol_type = genomic DNA
atggacttaaatgctgttaagcagaagcgagtggaagatgttaggaaagtcctagctggagagttggggctttctgatgaagtaaaagaaattattaaatcattcggtaaagacccctctaaattccttccaactcaaattctgactttattaagatacacaccagaccaagttcgccttatctttaaattgatgactgataagaattatgtagcccctcagccgggttctcaagaggtctttttaaacactaatgctgacttggttctttatggtggtgctgctggtgctggtaaaactgctgcattgttaatggactctttaagatttattgaagaccctaactataatgctgtatatttccgtcgaaatacaacacagctacaaggtggtttatggcctgctgcaaagaaactatttggtaagtttggtggggttcctcacgagcagaaaatgactatcacattcccttctggggcaactatcaagtttacctacctagaacttgaaaagcacgctgaaggtcatcagggtattgaatactcagctatttactttgacgaaggtacacacttctctgcttcacagatttcatacctacaaacccgtctacgttctggtgctgaaggcgattcatacatgaagatttccatgaacccagacagagaccactttatttacgattgggtagagccattcttagatgaagaaggctatccagaccctgaaaaatgtggtcgtattcgttggtatgtaatgaacgatggtgtgatggtttctgattgggagagagacaagattcttgaaatgttccctcttgagattcctcaaacatacaccttcatctctggtacgattgatgataacccaattcttgacttcttagaaccaaagtatcgcggtaagcttgaaaacaacactcctgtaaacgttgcaagacttcgtttcggtaactggaaggctcgtgcagaaggttcaaactactggcaaagacaatggtgtgagattgttgattcactcccagaagatgtatttgatgttagagcatgggacttagcagcaactttaccatctgaggttaaccctaatccagactggacagcaggtgttaagatgggtaaatctaaaaaagacggttgctattatatcattgatgtagtaagatttagagatagaccctctggagtcgaaacacaaattaatttgactgctgaaagtgacggtaagcgaactggtatttttatcccccaagacccaggcgctgctggtaaatcctacgcaacatccctcatcaggaaacttgccgagaaaggctatcgtgcaagagctaaaccaacaaataaagataaagttacccgatttgcggggttttctgctgcttctgaagctggacttgtaaaagtcttgagaggtagttggaatgaagcttacttccaagagcttgaaggcttttgtggtgacggcaaaactaaagatgaccaagtggatgctaccagtgatgctttcaacagtctgaacgaagttaaattattcaagccaccatcaatgggtgctcacacagacttagtgagaggaaacccatatgaggggcttagacgttgatagctaggtgagaagaatggcagatattacagaaacacaagaaagcttaccaccatttagaatgggtgaagtaggttctttgggtctgaaggttaagaatggaagaatctatgaagaacctcgtcaggcactaaggttccctgaaagtattaaaactttccaattaatgatgcgtgaccctgctgtagcagcatctgtaaatattattaagatgtttgtcagaaaagtcaactggagattcgtacctccaaagggaaaagagcaagaccctaaaatgcttgaaagagcagacttctttaattctttaatggatgacatggagcatgattgggcagattttattaattctgtaatgtcattctgcacttatgggttctgtgttaatgagaaagtttataagaagcgacagggtaaaaaaggaaagtaccagtcaaaatttgatgatggtctaattggatgggctaaattaccaatcagaaaccaatcaacacttgataagtggtattttgacgaagactttaggaaagttactggtgttagacagaatctgagaaatgtttcacatattgctggagcaattaatcttggagaaagacctctaacaagaaaacttccacgagctaaattcatgctgtttaagtatgacgatgaatatggaaatccagaaggtcgttcaccactacttaatgcttatgtaccgtggaaatataaagtacagattgaagagtatgaggctgttggcgtttcaagagacttagtaggtatgccaaagattggtttaccaccagactatctagatgaaaatgcagaacctgaaaagaaagctttcgtacaatactgcaaaactgttgttaatgatatgattgctaatgacagagcaggtttaatctggcctagatatatcgacccagatactaaagaggatatctttgagttctcattagtttctagacagggtgctaaagcatatgatacaggttctatcattgacagatattccaagcaaatcatgatggcatttatgtcggatgttcttgctatgggtcagtcaaaatatggttcattctctcttgcagattctaagacaagcctgttagcaatgtcagtagatattctgctgaagcaaattaagaacgtaattaaccgtgatttagttgcacagacttatgctcttaatatgtgggatgatgaagaacatgtacaaatcacatatgatgatatcgaaactccagaccttgaagcaattggttcttatattcagaagactgttgcagtaggtgctttggaagttgacaaagagctatctaacaaacttagagagcatattggtctccctcctgctgatgagtctcagccagtatctgaaaagctttctccaaatagccaaagccgctcaggagatggttataagaccgctggagaaggtactgcaaagacaccttcagcgaaagacccaagcacagcaaataaggcaaataaataatggctgaagttatctctatttcaaatgctacacgagtgcattcgtataggggtgtccttatcattactgacaagttatctgtagaggctggctcaagggtcagcctttcaggttatgttagtgatggtggagtctctgacgttttcactatttgcaggttacttgatgcaccaatgagtggaaaaccgtttatttcaggaaattgtagtgaaattgttaaaattccatttgacagctcatgccttttgggtgtaaagttatataactgcgagaataaacgtatcaatgttaatagcattgaagccgctttcattaccctcgatactgcatttcaatctccaatgacagttaataaagaaacaaacagacttgaatacattttttcacaaaatgattacaaagtacttgtcaaaggtaaagtatatgatatgattgtaaatgtggtagatgaatctggtaaccattcaacagtccttaaacaaaaagtaaggtttaattaatgggaacattaactattgatggtaagaataaaatcctcgccacgctaaccccaacgactattattttacacaatgtagacccaacggcagaccctacagcaaataaggttactcagccagtggctatttatttttctgaaccggataatggcttaattgcctcagaagatacagttaatattactgttccagcttctgcaacggtctcacactatagcttgtgggatgctaacgataaatgcgtggcaactggtgctcttagcaaacctcaattcttcgctgaagaaggtatctatgttatctcttcagtctctgtagatttaaacaaatagggtgagtaaaaatgagttcgaatatcttcagacttgctgatagattattcaaccaacctttactagccactgaatcattagctcactcagcagcaacttatgtgaataacagattgctgggtgatgtccaagcagcagtaaactttgataaacccaaaggtgaagcaagaagtcttttaaaagtgaaagatgacattgctattatccctattatgggtggtttaacccatcgtatgacattcattgatgcaatgtgtacaggtggattaagctcttatgaaggtttgcgtagaggctttgacgaagctttagcagatgagtcaattaagactatcgttctgcatattgattccggtggtggtgaagcttcaggttgctttgaattagcacgtcacattatggcttcaagaggccaaaagaaaattattgcttatgtagatgagttcgcttgttccgctgcatacgctcttgcatcttctgctgaagaaattattgcatcaccagatgcagatgttggttctattggtgtaattatggttcatcaggaattaactaaggcatttgaaaagaatggcgtaacaattaacgtcatcaaagctggtgagtttaaaggtatgggttcaccattccaagcactctcagaagaaagcaaagaaagacttcaaaagagaattaatgatacctacgcaacctttacaggttttgtagccgaatctcgtaatctctctgaagaagctgtaaagaatactgaggcgaatgtttattctgctcaggaagctcttgaacttggtttaattaactcaatcatgtctcaagatgatttcttaaattacttacaaggttctgaagaggctcctgtaagtttaaacgttaacaattcaggtgaagaaatgactgaacaagaaaagcaagaactagaagctttgcgtcttcaggttgctcaaatgaaagctaaagaacaggaagctgctttgtcagatttgactaataagatttctgcttctgctgaagcttttgggtttgatgcaaaagaagctgcaacgactattttaggtgctggtcttgataaccctctgagcattctgtttatgaatgctatggaaggtgctaaccagaaacttaatgaaactatcgcgtcccatgcttctgcaatggaagaaaaagaatcagaaattaccaagctgaaagaaactgctggtgctgttcttgaacattctaatgctatggaagaaatgggtaatgacggcgaagctgatttggttgaagaagaaaaagaaccagctaagaatgcttccgaagacaccgctgaacaacgcaaactggctctccagaatgctctaaaatctcttatcaaataaggaacacaataatggcatatcaaggttttactaagttaggtaacagagaacctctgaatgatatcattctttgggaacagattaccccaacaggccactctcgtaaagagtacaccccacaggcatctacagagtatcgtgtaggtgaagttctgaaagcagatggtactaaggtacaagctggagaagaagcccaagcagactctgtatgtatcgttaatttctacgcagacctgcaactgtcttatcatggtcagttgaaagtagtaggtatccaccgtgatgcagaactgaaagacctgctaactcttgaatcaagcgttgatgctactgaagtcaagaaagctctggctgctaaaggtattgatttcgtaccaactggcctgtaataacaataataagacattctggagaattttacaatgttgactaattctgaaaaaagcagatttttccttgctgacctgactggtgaagtccagtctatcccaaatacttatgggtatatttccaacttaggtctgttccgttcagcaccaatcacccaaactactttccttatggacttgactgattgggatgttagcttgcttgatgcggtagaccgtgatagccgtaaagcagagactagcgcacctgagcgtgttcgtcaaatcagcttcccaatgatgtacttcaaagaagttgaaagcattactcctgatgagattcagggtgtacgtcagccaggcactgcaaacgaactgactactgaagctgtagtacgtgctaagaagctgatgaagattcgtaccaagttcgatattactcgtgagttcttgtttatgcaagctctgaagggtaaagttgttgatgctcgtggtactctgtatgctgacctgtacaagcagttcgacgttgagaagaagactgtttacttcgaccttgacaaccctaatgctgacattgacgcttctattgaagaactgcgtatgcacatggaagacgaagctaagactggcactgtaatcaacggtgaagaaattcacgtagttgttgaccgtgtattcttcagcaaactgaccaagcatcctaagattcgtgacgcttatcttgcacagcagactccactggcttggcaacagattactggttctctgagaactggtggtactgacggagttcaggctcacatgaacactttctactacggtggtgtgaagtttgtccagtacaacggcaagttcaaagacaagcgtggtaaggttcacactctggtgagcattgacagcgtagcagacaccgttggtgttggtcatgctttccctaacgtatctatgctgggtgaagctaacaacatcttcgaagtggcatatggcccatgtcctaagatgggttatgcaaatacacttggtcaggaactgtacgtatttgaatacgaaaaagaccgtgacgaaggtattgacttcgaagcccactcttacatgctgccatactgtactcgtcctcagttgctggtagatgttcgtgctgacgctaaaggcgaataatattcttaaggagggttatgaatgtgttatacaggcgacccagccaataaccctcttgatagagtaagaatcctctgcacagacactaataatgatgaaattcttattgagcagtctgtgctagagtggttctacctagaatctggaaaggatgaaaagaaagcagccatcaaagctcttaaatatttactctttcaagtagccaagatgggagatgagaaagttggtggtgtttacttacgtaactcttccagattcaaatctctgaaagctgtttatgacgaccttgttaaaagctctgtttcaggactaccctatgcaggtggtattaatcagtgtgatattgacatgcgtcgtcataatccttgctctgtcaagaaatacacagaatatggtgatgctgccagatacgaaggcagagattactgcaaccgtgttaatggcgtatttattatcgagcgagatgaataatggttaaaagggttattcaccccgctagagcaaaattagtcggggctatgaagaacttgcaaacggctaatgctcaagttgggtattttcaagaacaaggtcaacatagctctggtttttcttatcctgctttaatgtatttacaagaagttattggggttccttcagcttctggtaaagtatatcgtaggttgtttgaaatcactatgatgctaaacaaacagaccttgttagagcagactaagaagaatctatataagcaacttagcagtctcaacacagacccttcaaataccttagaagcatttgcaaagaatgctcaaaaggtaattaaaagaggttttggtaattctgctatcctccctcctaacgcaccttccacagtcaagaaaaaaggctttaatgcacctcttgttgagacaggtgacttaagggataaccttgcttataaaatttctactaagaagggtattaagaaatgagactcttaaacagacacagctttgtagtaaagcgtaaagtctctgaagacggttattataatgatgatggtgattgggtagcttcacaagatgttgtagaggttaactgtaaaggtaatatccagccatatatcaaaggttctgtaaagaatggtacacagattgctttaccggaaggtattaggcttaccgatacaagaatcctgtacactacatataaacttagaacttcagacgatgtagagtggaatgagtctgacattgttatgattgatggtcatgagtatgaagtatttatgactatggattggtcacagcaattagcccatacatcccattatgaatatatcattattagaagggataaaatgaatgcagttagaaacagcagaacttgaaaaaggtctagttagaaccttagtggatgttattggtcacagactagctcgtgataagaataatagaccaaatgtaattagagcttacccttctgataactcaaatgacaaaggtttaaaacctgaccagccatttattaccgtatattgtcaagatgctgcaacaccttatggttgggttcttgataagtttgttgaggatgatgtagtttgctacagaattgcttttcagattcctgtattaattacggtgaatggtaaaggtgctcacagtattatgcttgagcttaaacaacgattagagatgagttcagtcagagatttaatccttgaagaaacaggagcaacagttttagatactggagcaatcccaaatgattacacttatctcaatacagatttcgaaaattctgcgcctcttgttgtaactcttgtaaaaaattcagtcctgaaagatgaacgtggaagtattattgagcgtgtcattgttgatggtgagttggtttatgaagaaggacaagagccaccagaatatactatccatctagatgtagactccaaaggggtaaaataaatgtggaatccaattgttaatgtagatattacattgaacaccgcaggaactacaagagaaggttttggtttgccactattcttagcttcaacagataattttgaagaaagagtacgtggttacacttccttaactgaagttgctgaagatttcgatgagaatactgctgcatataaggctgctaaacaactttggagtcagactcctaaagtaactcagctttatattggtagacgtgctatgcagtacactgtatcaattcctaatgccgttgctgaaagtacagactactcaattactgtagctgctggcggtggaatttctcaaccatatcagtatacagcgcaagctgaagacactgctgaaaacgtgttgcaacagtttaaaacacagattgaagctgacccaacaatcaaagataaggtttctgtgaatgtaactggtagcaatggctctgccacaatgattattaccaaagctggtgataatgactttgtgaaagtaacaactacagcacagactgtgtatattgcaagtacaactgccgatacagcatcaactgctctggcagctatcgaagcttactctactgactggtatttcattgcagcagaagacagaactcaacagtttgtcttagcaatggcttctgagattcaggctcgcaagaaaatcttctttacagctaactccgatgtaacagccctgcaaggtacagaattagccagtgcaaatgatgttccagcacagcttgctaagaatatgtacactcgtacagtttgcttgtggcatcacgcagcagcagaagactatccagagatggcatacattgcttatggtgctccatatgatgcaggttcaattgcttggggtaatgctcagctaactggtgtagcagcttctctacaaccatctaatcagagacctctgacaagtattcagaagtctgctttagatgtacgtcactgtaactttattgaccttgatggtggtgttccagtggttcgtagagggattacttctggtggggaatggattgatatcgtccgtggcgttgactggttagaatcagacctgaaaacttctctgagagacttgctaattaaccagaagggtggtaagattacttatgatgatactggtattacccgtattcgtcaagtcattgaaacctctctacaaagagcagtcaacagaaacttcctgtcatcttacacagttaatgttcctaaagcctctcaagttgctttagcagacaagaaagcacgtatcctgaaagacgttaccttcgcaggtatcttagcaggtgctatcttggatgttgacttgaaaggtacagtggcttacgaataatagaggtaaattggaatggctatgtatcagcaatattcccctaaagacgttgtatgtagctggaatggtattgccattgaaggctttgccccagactcattcttgcgtctacagagaacatcaccacttgtgacaccagttgttggtgcaggtggtcaggttgctctgacaagaaatgcagacaagacaggtactattgagattgagctaatgcagacttctctctctaaccagatgctttctgcaattcaagctaaacaagacaatatggaacttgaagaagatatctcttctaacttcgtaatctacgacccatcaggctctgttctggcaactggtattaatgcttggttgcaggaattaccgcagattgaacttggtcgtgaccagaactctaaaacttggatttttggttgtgagaagctagactacacttctacaattccagcgtcaagtgtttaataaatcctataagggggagactttaaaaggtcttccccttttttgtttcttttaaaagtattaaggaatcacaatgaaaacagaatctagagtaattaatggtaagaaagtaaatatcgttctgcttggggcaagagatggtattaagatgtctatgaagttgggtaaaattgttgttccaacttttgcacagatgctgtcaagtctgactgacaagggtaagaaagaagctccaatggttccatttaaagaacttgttgaagcttgttttgacagaattgaagaaattaaccttgaagagatggctaccctgttatttcaaggggcaactgttgatgacttcccacttaatattgatacatacttccaagcaaactatggtgaatttattgattacttagcatttgcgctggaggcaaacttcggaagttttttcgaagcaagcattttcaaaagcctaacttctcagtaaacatgggtaacactctacagacaccactaactgatgctgctgtagaggcaacctatgaagaagcagacgagatgaaatttgtgcttgctatttatggtatggaagggtgtaaagaaacacttgaccaactctttgctatgacattctctgatttattatcattgagacaatttcttgaaattcagaggtcgtataaagaggaaattgcttacaacgaacttagaagagcaggaaaaatgtaatggcacaatatacagttgatagcttcattgtggaacttggtttcagtgaaaaggttgttaagggcttgcaaagagttgagaagatgtctatgcaagctgctcaacgtattgagagaaatattaataaagcctttgatgtgaaaccgaataaaagctctcaggaagcacttaatagaattgtaaaaaatgctcagtctgcttcgggcagaatcaataaagcactcaacagttccttgaaccttgattcacaaggtgttaaatctcttaagaaacttgaaactcaagcaaaaaagactgcaaaaggtattaacaagtccttaagagatgctatgaaggttgacggtaaaatcactatcaagacaggtagagggagaggtggacagagtatccctcctgttggtggtggagcacccagaggtccgagagtagatgttgctcagagacaaatggaaagaatgtttaacaacaacttctattcagggttaacccgtagactggaaacaatcggtggtcaaggtaaccaaatggcagcctctttcagagggagcttgcaaaatatctacaacagatacaaagggactggtaaggttggtgagtatgagatggaagttaaaaagctcatcgacgtaaccaaacgttgggttattgcagaaaatgctagattaaaatcagttaaagaatcagcttggctacaggatagagctaacgcatcattacgtcaattagttggtggttttgtttcagcttacgctttactggaactgtcacaaaagactattgaggctggtgtaaaaagacaatctgcacagttagcctctacagctatctttggagcagatacacagcaagccagaatgtttgctgcatcatttgcacatcagattggtcagaactacacagataccatgaagcagtactcaaactttgctgctggtgctcaaccaacacttggttttcagggtactcaagagttctataagaatgctgcaatgtttgcccgtatcagaggtgctaccgatgaagacttgaaaggtatcatggttgcattccagcagatggcatcaaagggtaaagttcaggctgaagaactccgtggacagttaggtgaccgtttagcaggtgctgtacaactattcgctgatgccattggtaagactccacaagaacttgataagatgatgcaagacggtaaacttcttgctcaagacgttcttcctaaagtatctgaaagaatggctgaacttgtcaagcaagcaggtggtatgaatgctgtgtccaagcagactgctacatcaatgggtcaagcgaaggctatgtgggataacacacttgtagcactgtttaacaattctagtgagggaatttcacagttatctaactccgttgcaatgttcttgcaaggttctatgggtagcacgcaggctttaggtcttgtgattgggaacctgttaaaaggcgctagtaatctacttgacttcattacagacttcatgtacagaacatctgcactatactactatgcaagagcttggtataaagaccttgacaacagccagcaaaagcttatcaaaagtgctggtgaatttctaggaacagttgtcacaattggaggcgcagttgctgtagtatcaaaagcagtcaagctcctaagtggtttggttggtggtggtatctttggtaaaatcttacaaagacttggtgttagtgcagcaggtacagcagcagccggagaagcagccgcagcagcaggtggagtcacagcaacgagaatggcacttggtactgttggttcagcattaatgctaagaggctctacagacccaaatgctgctaaaaactacagtgaagttacattaccaaaaccatttgaaaatgctgttgcaaatattacaaacccaaaaaggccaatgttctttgatgagaatggtcaacttcagtttgcacagtacactcaagacgttgaaggcaacagaaagttaattgataatggtctatctaattgggagattatcatggagaagctatcaacatctattgataattttgccaataagtttaaccagacaccaatgatgatgacaccttctggtttacctatgcagactaaacaaaccctgaatgttactttcaatcttgatggtaaacaaattgctactaagatggtggatattactgacaagaatcaagaagacattcttctaagttcaagctatccagaggaagaataatgttatgggattctaatatgcaaatcaaatatagtggcaaagacggcatctatttccacttaagagataatgtagatgccttcttaaccttatcagcaactgaaaatatggaatttgacagccctatgcaggtaactacacagaacatgcaatcagggcaaaccgtcacagataatgtgcaaagagcacccagaacaatcactattagtggtgtcgttgtagttggctatgaaggaagcttattattaactcgtcagggtcaattagtagaaaacttcatcgacactcttgaaagctggcgtgaccagaagcaaattatttcggttatctgtaaggacggaattaaaattgatgattccattattacgagttttaaagcttctaaagatgttggtatttcaaatggtctaagagtccagctaacttttcaggaaattaacttcaaagccattgtgggtcagactgatatttcggctgcaacaggcaagactgctactactaatgatggcggtgctaccagtaaaaagaatacagggaacactacaacaagtttaggtaatggtaaattaaactgtcagttattatttgacctagatgctaatggtgtaagggaactcactagtgctgaagacaatgctcttgcaaaatgctcaatgtctgcgaagacaagaaaaggtgttactacattcagtgaagaggctgaaagaaatgctggagcagcgttaaataataatactgctggaactggaaaggcattacaaaagcactcagtgaatccgaataagaaggggacttattaatgtcacaatatattcctgttcctgatacagaatggtctacacaaactgtaactctggatggtactgtctttgtaattgagttaaagtataaagagaggcttgacagatggttcttgacgctatctgatgttgatggtaatgtattattatctgaaaagaaatgccttgcagaccagtcaatcacaggacgctatgtaattccttcattagctggagagctttttgttgaacgaatgtatggtactgatttacaacctaccagaaataacttcggaagagaaaaggcatttgagcttaattattacactcaagaagatatgagattaatggagaatttataatgtctgtaaaagatagcactgctggggcttcttttaggtgctatcaattggctgtaggtagtgaaactacagcctttaatgataaacctacaagccatgctaaagattctatgcaaatggactattttgacaacttacaattcacttgtaatgtgtcttatacgtctcagaagaataaagtaacctctgatgataccacttttgaaatctacaacctaaataaagagatgagagccaaatttaaaacggttggtgcaacagttatgcttagagcaggttataccactggctttaaaagagatgcgaacggtgaccttattatcgagtatgacaatctcccattaatttatctaggcactattgagtatgcttatacatataagcgtggtgttgatatgattacaaaggttatctgttccaatgataaaatggaaagaaccacgattaagacatcaatttcttataaagcaggaacaacacgtaaaaatgtaatcagagatttagtcaatagattaggcttctcacttattgatgaagacctttcaagtattgatggttacacttacaagaatggttttagtgtttggggaagtgttgcagaggcacttacaaaggtttgtgaagaaagtagtctacgttggtatacatttaacaagcaaatccgagtagttccttttaacgctaaggctagacaactttcttgggaaatttacccatataacgttattgattctttgcaaggctactacagaagaactagaaaggttctgaaaaaagagaataagactgttattaaagttaaaactggagttcgttgcaaaatccatttagatgggagaattaagatgggtgataacatcactattagggaaagtgaagattttgaaggtcagtatcgagtaaaaggtctttctcataatcttgactttactggtggtgcttggacaactgaactagatttagagaaggtggaataatgaagtcaccagttactagaatgtctgggtatgtttcagaatgtcttgatgaatttagaaaagaactgtatactggattaccagccattattcagtcttttgattcaaagactcaaacagccactgttaagccactttactctattaacggtttacctatgccagagattactggtgttcctgttcaatttccaagtggtggtggagcatctttaacattccccgtaaaaactaatgacagatgctggttagctttctcaatgttacctttagatgacttcgttgtcaatgacaagaatgttcagatggaaacaaacatgagaaggacacacgatatttcagactgtgtagctttcgtaggcatctgcacaagaacacagaattttaaaccagacccaacagcagtcaggcttcattttggcgactctgtattaagagttacagatgatggtaatttttattttgaaggtgatgtgcacatttctaaaaacttgtacgtaacagaagaagtacacggttcagattttatcagtgacacgactggtgtgagctttaatgaacacacgcaccattattactggacagaccctgctggtgaggctgatactacagaggcacaataatgaaaacagactttgcattaaatctaggtggtgactatgttgccactttaggttcagattcagtgtatgtggctcatggtgatttaaagattactggtaaccaaattagaattatcccagaagatgataaagctactcaggttgctcaaagactccatatcagatgccttttaagggctggtgaagtcttctttaacacatctgctggattcccttatttacaacttgccaaatttaaacagaaaacttctatctttgacaattatatgaaggcttatctcgttgaaacaagagatgtctccaatatctataattactcatcttcaatggataatgctcaaagaaaagtaactgttaattttgatgcaaccactacaacagatattttaacagacattacgcaagaggttaatatctaatggcaggattaactacaacaggattacaaactctaagatatcaggaaatttttgataatatcaaatcaagacttcttagagatatctcaccaaaccttgacgtttctgaagacagtcaattaggtctctttctagcttcaattgcaaggtctttagcagacactcatgaagtcctgtcagaaatctatgatggtgggacgattgataaagctgaaggttttaacctcgatgatattacagctttaaacgctgtatacagatatgtggctcaggctacaagaggccaagtagagtttactggaacaacgggtgcaacaatcccatcgacaactagactaagaagcactgctggtaatatcttctatccagtttctggcattacattgacaccttcatattgtgttgaggctgttcttgaagttaactctttacgaactgatgcaaattatgttattattattgataacgttattttctcttatcagccaaaatcttcagatacaatcacagttctattaactgaacttgccgatgcaatcaatggtggtatcgtagcaaaagccgaagttatcaatgatggttcagcattacgagtttataaagatgaaggcgacattattgcaagaaccaaccctatggtggtgactgctacgacgttcctcacattcacaaaaattacaactatctatgatgttgttgctgaggaagttggtgcaatccctgcattagctggaacacttatcgaaattgaaacaactgtagatggtcttgacagtgtatacaacagatatgacctgacaacaggtagaaacgaagaaaccgatacagagcttcgacagagatatttagaatctctggcagttactggtgtaggtactcttgatgcaatcgtagctgctgttaagagggttcagggtgtatcagatgcttcaggtgttgaaaatgatactgaagagacaagttcagaagggctaccaccaaaatctttcaagattgttgtagttggcggtcaaaatgataacgttgctcaagcaatctgggacaccaaacctgctggtattcgagcttatggagctatctttgggacagcttatgacttaggcaatttggctcataatgtctattttagcagaccaacacctaagtatgcttttgtcaaagtctcttattctttatatgatgaagagagcttaacaatcccagaagaagatatcagagatagtattgttcaaggtattaacgcttacggcagaactctgaaagttggtaatgatgttatccctaacagaatctatgggtatatttatgatgttattaaaggtgttgagattaatgaaatcaaagtagcactttcaaatagtcagtcagtaccacctagtgatggacagtacaccacagcaagaatcacggttgatggtgaccaatacactgtatgggaaagtagccagtataccattgctaaggagtaataatgtttcagaaaattgataacgtttactataagactcttgatgaaaggactgtaacacagtttaaagataagttcatctatacaagtttactaaaagcgattactgatgagttgcagacattggaagatgtttcatggcaaatgcacactgaaaggaatatcagaaaagctgttggacagcaattagacaacattggtgcattaattaaagtgccaagacctctcggtgctgatgatgaaacatacagagcgatgttgtatatccagattttcctaagacgctctgatacaaccccatcctttttacagaatgctatcatgactctgtataatgcaacattttcacagatttttgagcatattacacctatgactgctggtattgtaatcagggttaatacaagaaatgacgtcattgatacagcatacacattagcaaaaatttctgcaacaactgtcggctcagcagttattctaagagacgtaactcttaatggcactgcttggacacctgtagaggttgctgactcagctttagcgattgttgatgataaagataactggttcgttacagatgctaacaagggtcttgttactaacaacacaggtggttctttagagaagaacttactaggtagcttagcagatgctggtgtaagggacgcttattttagggttgacagaacggctaatagtggctcagtagattacttaaaagttaataaaaattacaatgctacagataactacatcgttggtaaagaaactgtagcaggtggtgattatggtgttatggctgaggtagctcaaatcatcaaaggtagaaaagataaatcacagcaagaaggaagttcttaatggcatttttaaattggtctacagatgaagtagatgctgatggtaaccagctaaaagtattaccaccgccagaaattcaggcaactggtttattaagaggtgaaccgatgggtcgccaatggtttaactatatcttgaactatcttcttaagaaagtaaacgggactgttggtgaagtcaggtcttttgccactgagcaaccagatttagtagctaatgggtggaaccttgtcaagactgaaacaggtactgcatcaacaagtacaaaaaacctctatacttatgaatttgtaggagcttaataatggcagtaggtgaaattcaaattagtgccttgcctcaagcagccttaccaattgaccttagtgatatcttccatcttaagcagggtattgaggataagagatgtactcttgagcaattacttgctccacactcaagcctaagaaataaccctcatggtgtgactaaaacacaaattggtttagataacgttattaatgctcttcagttagttgctgcaaataacttatcagacgttactaatgtagctcaggcaagagcaaatctacagattatgtcttcagaagaggttaataatcttgttcaacagcatattcaggacaagagcaacccacataatacaactaaggcacaggtaggattgagtaatgttcagaactggacaacatcgaatctttataacgaagatgcagacaagtacgctacagcaagagcagtaaataacttgtacaaggctgttcaggcttcctatccagtaggtactatccatctttccatgaactctgcaaacccttctacatatttaatttgtggaggaacttgggagttagtttcaaaaggtagagcattggttggttatgactctgatacaagaccagcaggctctgtatttggtgcttcaactgtcactttgtcagttaataacatgccacaacactcacactctgtgtctcttagtggtggtggtcacactcataatgcaactgtgtcaatttcagcttttgattatggaaataagactaccaactcttttgactatggaacaaagaccactaacacgactggtaaccacaaccatgttggcagtgggtcaacaagtgctgctggtgctcacaaccacagattgacctatgaatcaggtggtggtttatctgaaagacctgcaatggtttggtcttcaagaaatgaccaatcatggtactcagcagatgctgtctgtgaagtcgctggtgctcacagccactctttcagtgttaccactaacacgactggtaaccacaaccatacggttggtattggtgctcacagccacacagttggtattggttcacatacacacaatggtactgtaacagtttcttcttctgaacatacgcatagcgggaacactaatagcgttggtggtggacaagctttcaacattgagcagccatcctttgtactgtatgtatggcagagaacagcttaatttctttacaggggctttatagccccttttaagaggaaaatttataatggcagattacaagttgagtgaattaaactcaatcgatacaatccgttcagacgaccttcttcatgtcagggttaaaaagagacctgaaatgctgggtgatgaagaccgtcgaatgacctatcaagacttcttagcatcttttaaacttgaaagatttgttcagattgctggtagcactatggcgggtgacttagggattgttaagttactttatggtggtaaggtagtctttgacccaacaggctcttctgagattactattggggatgttttaaagtcttttaaaatcaatgcaaatggccttaaactaactattgcagacgcttcaaggtcggcaactgtttatcatactctgaataaaccaagccctaatgaacttgggatgagaactaatgaagagaatgatgcaagatatgcaaggcttgctgtgaataatacctttagaggtactcaagctatcctctctgacaatgaagcactcattattaaaaatatcactcaaggagcaccactctatcttcgtggtcaagatgcagatggcactaacagatggtatctaggtaatgataataggggcacacataaccttgtattgaagaatgtaaaaactgacgtttcaattgctattttagaaaatttggtgacagtcaatagaactcttcaaattgctggtcaagttcagccttcaagttttgctaacttagatgctagatactttactcagacagcagctaatcagagatttgcgcagttagctggcaataatacatttagtggttctaatattttcactaattttgttattaagaagaatgctaatgctattactattcaaaatgtagatacaactacggctttgtatatccaagcaaggaaatcagatggaactaataagtggtacattggtaatgatggtgatgaaaacattgtaaacatctataactatttagcaaaaacacaaatctcattaggtaacaccattaccatgagcagaacagtccaaattggtggtcaagttcaaccttctgattggtctaacattgattctcgatacattccagcagctactttgagtaatcttgctaagattaatgtggctaacacttttacaaatgtgcagactattgtatctaacaatgaaggtctagtgttgaggaacttaacacaggggcagccacaatatatccgtggtgttgatactgcgaatgtatctaggtggtgggtaggtgtaggtggcacaaattctactgatgtagccttaaacaacagctactctgggactcaaattactcttatgccttcagcgattaaggctaataagaatctaaccatcactggtcaagttcaaccttctgattggtctaacttagatgctagatattttgttaaaactcagttattaaaccaatctttaatgactgtctctgtagataaccttgaaaacccttcaggttttaatcttggatattcaggttttgtcagaaacaatgcggttactagtggactgaaagaattggcaattcatgttgcgcactctaataagactgctgcacatgcaagaggaatctcttttgtgtatggctcaaatggactggcaacatttacctatgcctatgacaaaaatggtgactatgctggagaagcacagatttatacaactgattttaaaccaaccccttcagatattggtgcatacactaaagctgaaactgaccagaagattgcacaggcagtaagtgactctacagaccttaataaaatctatccagtaggtattgtaacgtggtttaacagtaatgttgaccctaatacagcacttcctgggttaacttggacgtacctgaacaatggtgttggtagaactatcagaattgcagcagcaaacggttcagatgttgctacaactggtggttcagattctgtgacgttagctgttgggaacttaccatcacatacccatagtttctctgctaccacttcatcttttgattatggtacgaagggaactaacagtactggtggtcattctcactctgtaagtggtacaacaagtgctgctggcaaccacgctcaccacttaggtctgttattagttaacggtggtgatgctttgtacgggtatacaaccgttggtaacagcctgcctagaacacttgactggcttgacagaagagacaataaattccctaacactaacacaactggtaaccatacacatacatggtctggtactacaagcggtgctggtgaccattcccactctgtaggtattggtgctcatagccacacagttagtggtaatactggtagtacaggttctggttcagcatttagtgttactaaccagttctacaaattaatggcttgggtgagaactgcttaatcccttgttgactgattgttaagatggtgttaatattctttatgggtattctcaccatcttggctgatgaggtgattaaatgcctacaatcctagcaattcttctaaaaaatctaggtagcttcttctggaaactcattttatcccttctaagtgaatacatgattgagaaagtgttctttaggcttgcaagataccttgcgagtaaaacagacacacctattgatgatgagttcgtagataacttagaaaaagcttttaagggggagaaataaatgaagtggctagaggaagcttttaaaaataatattggtgcaattgtagttggtatttttagtgttattgggatgtataccaccatgcaagtctcggatggtaaacaagaagtgtctatcacaacaaagttacagcagttagataattattccaaaagtaattattcagctattcgtgatttacagtctgatatgaggctgcttcagctagggatggagaaccagaaagttcagttagagaatgttaagggtgagaacgcaaaacttactaaaacccttgataaattctctgatagtgtgaacaatctggctcaatcagtatcagccctccaagctattactgaaaagaacacaaagagtactgaaaagtaaagtttaaggctcctttttacgggagccttttttgttttatttacctactgacaaaggtgcttcaatctttcctgcatgtttgtagttgttgatgccaccaataaagtcacttgcagtaagatgttttaagtcacttaaggtgttaagttgtacaccaatctcaaaagtaggtgcatggaactcttcattgttcatcagttcataaacctgcttcatatggttctggtaaatctgagtatccccaaagacacctatcaagtatcgtggagtgtatccagtcatcttacaaagaacttccagaataaaaccataagacgcaatattaaatggaagtcctaaaaaggtgtctacagaacgttgataccattgtaaatcaacttcaccttcgttagtgatataaatctgaaacagaacatgacaaggtgctaaagccatcgagttggctgcaatatctgctgcattccaagcattaacaagcatgtaacggtctgtgatatcacctttcatcttcgttactaaggtctctaactggtctacaacacaaccattatgaccttcaaagtttctccactgaaccccgtagattctcccacctgcatcttctaaccagtcttgctcagaagaatagttagagcttaaccaacgtttaaaatcatctgaccagatagtccaacgttctccatcattttcaccccaagtgcgataacggagttcaccaagtttattctcaccattcaggaaccataaagcttccccaataacttgccgcgtaaacacctgtttagaggttaagagtgggaaaccagttctcatatcaaaacgaaactgtggtggagcaaatgcagagataacatctccagttcgtgtagtacgcagttcaccaacggataaaacatggttcaggatatttttgtaactcaaatcagcttgtgacatatcaaaagtgtccttttacttgtggaacataaatttcaaaagttgctttaccatcctctgatggttttgactgtacctttgtaaatacacggttatcatacagcttctcaaagaagtcttcaaaaggtaaatgtacagtgacctcttcagtaactttatggaaaacagtatggaacactacatcagcatatggtaaagcattgacaaggacacctgcaccaccaattacaaagacatcttcatcaatagagctatcaagatacttcaaaaatgctccaaatgactctttactggctttagcatacattacatcatctttgccaaagtctatgcctaagtatggtacagaatttgttaagatgaggtttgcacgttctggtaaaggcttactccccagagtcttgaaagtctcattacccatcactactaagttatttttagtgagtctcttaaactcttgcatgtcctgtttatgtcgaggccacggcataccagttggagtaccaaactcaccattttcaccacttgcaaagattaatttaatcattttgtaaaccctttcttaatgaaccagttgatgacactcttcacaactttactacgatggtagataaaatgtggagagggttggtatgaaccataagcccagaaagcgataatttcattacaccctgtgcatcgggtactttcttcagcaatatgaccgttgactatttcacttacctcaccttgtaagtctgtacacccacaatgtggacaacggataggtgttccatcagactcatagcagtgttcaattttcatctatttaacctcaaaaactggttcaagaaccaatataaagtctacacagtcatcttcttcatccagaataccatcaaagttcttaggaatgaagtcgaagaggctcataacaaaacagtcagaggtaacctttatagttcctcccatgttctctacagttaacactgtgcgactttcttttacctccctcagaagattacccacaaagtcatctaagaagtacttcatcaatgacttaaaacctttaggataatctgtaccagagtatgtttcaatctgaggtacaagcttaacatttatactggtctttgttaagaatgcactagagaacatactatcaggtagcttacaaacagtctttccagtaccttcatgttcaatctcaacaaaaccagcttcatcgccacatgtaactattttaaaagatgcttcattctcatactgtgaagccataaactttttaagcatttctttaaggaaatctgcatgagcatcttgtaagtagatatcaatcatagttaatcacctattatgggaacagacacttaatgtcatcatttttgaaaacgaaacttgtgtagttgtgaccgtcaacatccagccaaacagcctgaacatctacaccatcaagattctggtaaagctctttgatgaagtggtctttcacaacctgactgctagttgtttccagcttaatgtttgagattgctgagcctacagccatatagcccatgacacgtttcttctcagtgtgcttaatcttaccatctttgtaagccataatgagattggagagaatcttcacaccataatacttttcaaggtgagttggtacgccataaaagcctaatgcgaagttttcagagtggataatgttttcacgtttcatattaatctgccaaccttaaattgaaattaacaccaaatttttcacatacttccaacatatactcaagggagacgttaccagtgagatggattatgttggatacacgagcctgagagataccacaaattttagcaacttgctcttgagaaagacctctggatttaatctctctcttaaaacgatgtgcaacgaagtctctcatttcgtctacatccattggacaaatataactctccatttcagcctctctgtcagcctcccaatcatcttgtggagcataagggtcaaaaacctcattcatctttcttcttccgttttcgtgaagtgtcaatcaatgaatctatgtttgtagccctaaccttttcacgttcatcattaagataatcatcaagagccttttcaatctgtgaatcatcttgacagataactgtaaagactgtaaagccgtctgtatcatcaattaccttaccataaccgcttctgggatgtaactttttaagagccatatcaaatacctgtgcagcttctgttttctaagaaatactcaacgccatacatagctttttgcatcaaatcttctttaaactggatacggtggttgagcatcgcctgtacatcaatatcatcatggtgtttctctttaatgtttgcagattgcaggaaatactctgcaagaacacgatattgatagtcagtcaccttatcagtcatctctgttaaagactcttcagagattggtttaagtagttcacctttagatagagcaacaccttttacaatctgacaagtatcctctgggacacctgataagttcacatttggcagttctgttgcattgactggtaaattcattgccataaccattgcagcagctaataaaatctttttcataatgacctcaaagttatattaaattttgtattacattgagtataaaaataagctataacacctgacttgtcaacagattttatagcttatttggcagatttttttataaggctactgccatccttccataccttacctaaccaaaccgaacctcacacaaccagaccgagccgcaccccgccttattaaaagaccctcttaaagaccttttaaaaaggtaagtctcattttaatgtagctgagactaactacccgcaccgaacctcacctgacctgaccgcgccatacctaaccgtgccttaccacacctcacttaaaaacccttttaaaagactcttaagtgatgtaatcgaatttttatgtagctccgattaactacccatacctcactttacctaacctgaccttacaagaccgtacctgacccgaccccacctcgcagtaccttgttaaaagaccctcttaaagaccttttaaaaaggagcctccgaagaggctacctagtcaacttagaaaggttttctacgttgcttgttaatgttagctttcatagcagctaaatggttttgctgttcaatcagtcgtgaacgttcttgatgactaagtgccatagtgttcacattctcaatcgcttgagtggcttgctttaaagcacgaccaatcttaccagacattttacgttttgcaatagttgcttgatgtttaggttcaaccacacgataaccaacacccattgaagcaaccagataaatcttctcttctttaagaagcttctcaataaacttctcaagtcggtttagacgtgtaagcgcataagccttcatttcatcttcgtacttaacaatgtcaccttgataagttggcttcacaatacctaagaaggtgtccatctcagaatgtgatacagtgtcaccgtaactaaactttgctgctaatgcttttgtattcataattaaacgttaccttctgaaataacttctacagaaaaacgaccaaagcgtggacgccaatcacctacaccacaaaggttgccagcattttccagaaccatcagaagttcctctctggtgatttgctcttcatcaaacatcaaaccaaattctacagaccagtcacggaagattggacggtagctcataactcgtgctgtaccaatcttaacagacttagcatagataaagtctgggttcttagcaagttcttgtgggtttgctggacagttcttgatagtcattgggaagactacatctgtcagcataatggctcggtcaattaccttaccaagtttgttgagttttgcaccagacttgatacaagcctcaatcatctcaccgttcataacaaaacctagctgctcatcgtagtaacaagaggttaccagttggctttctgctaagagcgcatagtcttcgtcagtctttttacgtttactggacagagacttgtgatattttgtcagaggatttaatgggtctgacagcgtatcagcgtggctcaggaaaggacgagtaccagtgattttgatatttaacagtttcataacatttagctccacactttagttgattgttaagttgtttgtaaagaaccctcaacagaagactctttagaaacttggtagatttttaacgtggctactaccatccacccatacctcacctaacaacacctaacaacacaaaactacaccccacaccaccgcaccacaccaaacatcacttaaaaaccctcttagaagacccttaagtgatgctggtgagtacccgttggtttatgctgctcagtatactcaccaaattttctatgtcaacaactttttattcgtagtctcgaataactaacccaacagggaactgtaaagaacctttacgagtcatcttctggaactgaaccgtcaaaggtttcccgataaactcttcaggatgttcagcaagatactgtttcttctcatgagtagtcttccatgagacatctacaaagacgttaggaagagtctctacaacgaacttgccatgaccacgtttatcagtctttacaccagtcactttaaactcttcagtgtgcatcttcttgtgcttaatcaagaagtatgaacggtgacaacactcatagaaggagtcttcagagattgaacggtacattgcgccttcaaacttagcttcaacccacttatcatgagcttcatcaaactcttcccaagagttaacacgacgagatttaacagggacaactttacagccatctctaaagtcattcaatggtgaagtctcaataatatctctacgctcaggccacgtcttagtactatcacagatatcataccagtagaacttaagtaagtgtctgtcaggattgtcttcatttttaatcatggagacaatatcttctaagtcccacccatgagcataaatctctccatcaaattcatcaacatctttgtggagccttaacattgccataatgtcgggtattagttcagtagggattttataaacagtattctcacgagagtatgctgtgaatacactaccaatgcttaagtgtcttgaaattctacaacggacaccatcaagttttggttgagcatcagcagggaacttcaaatactttgcatggctaacctttgcagcatcatgagcaagctgtacacccaccttctcagtattctgtgcagactcttttgtgtaagcataacctttacggtcaacttgctttttatacttagcagcaacttcaaagagagcttgctgttcagcgttacgctcattctttttaccgatgtttttaggttctgctgtatactcttcaaacatcatcttgccattttctttaccataggttgtaataactttgtcacctacagcaacacatgaccagacgttgaaggaaccgtctttattttgtttgtacagaattgtcatttttattcctctgagtgataccaagtattgcaagcattacatgcgtaaagctctaagtcatttttatccggtttatgaaagcagtttgctccgcagtggcaacggaatggctttccatcaactgtcaggatgaatgattgaatcttcccatcaggagttcgtacagcatttttatgcttgtcttctttgttcattttctcttaccaccaatctctacgtcgataacttgaacatcgccagcaacatcaaacttatgaatgatgctttcagcagtgtaagtccaaccatcaatgcgaaccaactcaccttctcgtgggacgattggattacgttgagctatggttgcagtggagtgaacaacgtcataacgatagatatagtttactaggacttccatcgtgaaaacctcactcaataaccgtagtatgtgattgaccatttttgccgtagctataagatgttgttgtttgagagtttggacatctgacaacaataatatccctacttatagcatcaccatgtaacttgtatactctgcaatcttgcatctctggtgggagactgtaagaagcatttttatcttcataagaagggttgcagccagatagaaaaataacaccaagtgcaattactgctttccacataatactcaccctattactgttcacgatgttctacttctctgtatgtgcgtcggtagtttatgataagaggtgctaattcattgcttttaacatttgaacgtaacagttgccagtcaaaacctttagcgactcttccatataaattaaataactttactttgcgtttcatttttggtatctccaatactcagatgtcaatattaatacgctcacccttaaggactcctgtacggtctcttgcaatcttaccgtcaacaataagaatgtgtgcagaccttaaagaatcatgattaaaaccttttacgaacttactaggcatcactacaataagcatctcctgaattaactctggagtgtagcaattgccatgaagttgctgaataacgtctgcaagtgtcatataacctcctatacaagatacagtataaggtactcttccatgagcaccttgtcaacactaattagtgaacctcaagccagcttttaccaaccttaccagtacctgtaacaagcgtttctttcttaagacctaagttcttagaagcttgtccataataccagtcagtaactgctttcacttctgccgtcatactttctggacattcccaactcgtctcgtcgtgatatgcgcagagtaaacgagcaccaatagctggtttacgcccatttaacttcattaagccttcgtcaatcatacgacggcaagcaaggttaattgcctcattttgaatctgagcctctgaacccatgagcaaataattcaacagcttatgcggagatttacaccacaaccaagctccagcaacctttacaaaaccccctttagagattgcagcagtcttaccaaacacctcttcaagtgcctttttagttgctttgtagtcagcttccaagtcatctaacagcttcttaattttaggcaaacgtataaagtaagtctgtttagtcagcgcaccttccttagtagtcgcagctttaatcgtcttagcaaacttctcatcacctgcaccgaacagcagtgcatagataccattcttagctttcttacgacctttgctaatctcatgaagaagattctcatcctgagtagctcgacaagtcaagatgtcctgctcatcattcaagctaaagtaaatactgttcagtgtatgtgcatcagttcctgaatagacaacgtacaggtcattctcagagtcatagcgaaggtacttatcaatctctgggttgaggtactcatcaaagtgtttgcagtaatagcgtccatcttcttgacgaatgaactcaatttcttctttaccttgcgttaccgctttggtgaagtctttatcacccataaagttacaaagtagaactagctgggctgagttcatatctacagagacaacgttagtaccttcctcacaaatccacactgccctcattggttccccatagacagcagcaccagacggtacgtttacaataccatattgtgtcatacgtccagttgaagtaccaaacaccattgcaccagcactaaggcgaccatcaggacgaatctggttcaaccaacctttttcatcatcctttgagttctcaatagttctgcgtcggtgcatcaaagtatagtacttagcaatcttctgtccaagctcaccttcaatcgtatcataagatgattcagtaagttttggtgaagtacggattaagcaaggctcaagcaaatctgtgtacttcttcacagaccagttatgctcaatgtactgtacaccttcatgttcaacatagctcaaaccacaccgctcaaccatttcctgccacttaggatgttttgtaatcatctttttattgtctttgaaacgacaaactttgacagggcgaccgtctgagtctttcttgtagttccagtcatctggaatccaaccaactgatttcaagtagtctttaacaactgctacctgagtcatacgagaaacttcaaaatcaattggtgtatatggtgcatcaatcaaacctgtgtagcgacttgactcaagctcaaagtggttaacaacgtgactgttatagtacttcacagttttgactgttttcactggcttccagtctttgcatttcttaccaatctttgcattcaactcattgcaaattgcacgagcatccttcattgctacaaagccttccttgtactcttcaccagttacagagttggttggtgtatagcaattcctcttttcaatgttaaaaatctttgtagttggcttaccaaatggtttgatttcgtatgtctgcatctcaccgttacgcacctgttgacggtacttcgtcttaggatacttggtgattctcttcaacccatctgcatgaccaaatgtttcaacatactcattccaagcctttgcaaactcttcaccagttactttacctttggtcttaatagttggaggtagatgtggttcaacctctgaagcaagctcattagtcaacttgtcaagttcctttacatggaactccataagctctttatcagctttccaaccattgatagcttgctggctcatccagaaagatgtttctttagctcgcatgtaggtttcataagtatctatgccacacttcttaagcttgagatactcattatcaagtgcccgtttagttttggcgttaatacggatatcttctacaacacgagtgaagatttctgcattccacacaccccaatgttcaatctctggtttacgaacaccaacacgagcaccccatgcagccaaaccatgagcacctttataaccctttggagttggtctatccatccactgaacacgagactggataagagaatcctgaaagaaattactccacggtttacactttgggttatcaaagttccataaatcaggtgcaatgtgattgaaaacccaccagtcataaccgagaccgttatggatgcaaagacgttttgcctttaacgcaaactcaataccttcacgtaagccacccttgatgtacttggtgtacttgtgaccgagaataggttcatctgtaaagacccatacaggtggctcttcatcgtcagatttatagtctgcgaaagccattacgtgcactttagtgaactcaaggagtaaaccatcagtttctgtatcaccaactaaatgtaagtttttaaaatctacgttttccatttttactccctctaaaatcattaacctcatacattactgcaaaaaattataaaaagcaagttgacaatgcacttgacaaggtgttaatctttgcgaagtgggtttttacttaaaaggttacttaacagtttaactatacagatactttaaaactcttaaaagattatttaatagcttttaaaaagctttaaagtataacgtatagaatacgttaagataaaagattaaaacttaatagttacttaaaagaggcttacatgcagaaaatgtttgttcacccagacatagctgactttgttagagctttgcagaagttggaagaacttgacattgctgctcaacgggaatatgctcaccatcacaggagaatggttgatatacaacatgaaatagagttgtctgaaaactatgaagatgacttaaaatgctctgtatttgagcatatgaaagatgttgctacagctagacgtaaagccaaagacacagttgctttactagattctcttaaaaagaggttgcaaagtggtacagacctgtgtaatctagcatcactgattaacgatgtcgaaacttcttgggatagacactactatccacgttctgaaaagacacttgacttttcttcatcagaaaacttaaaatgttctagaaagaaacttaaccaactgagagagaaataatatgaatatcgatgtagaaaagatgcttgaagagaaaggtgttgatgaagcattcttaatcaatgccgtagaaagcatggctatgattcttcgtggtaacaactacacagaacagtttatgcctgcaagctataacttgcctgaagacaagtctgataacggtgcttttgcagaacaggtcaacatgatgttaacagacactacacttgctctggcatctattgcggttggtgttgatgcacttgctgagttcattttttatgaaatgcaaaagaatgactatatcaggatgtcagacgaagataaggaactgttgctgactaaggacactgattccattattgatacgcttatctcatcaacgagtgctgttatggctgttcttgagaagcgtatggaagagaaactttcacgatatgaaaaacttgattggggcgtagaagaattaaacccacgaatcaaagagattatccagcaaactaaagagtctttggaagaagctgttgaaaatgactctgtagctgacattgaaccacttcaggtgaaagttgcactgatgattccagctatctctacgatgatgaatatcgttgcactaatccaactgtcacagatgatgggtgtgagtattgagttcattgaggaaatgactggtggcgttagtatgcaagcaatcaatgatgttttggtgaatattggtgcttcaatcattgaagagaagctacgcattaacttcggtgatgattttgtgaagcaaatctcagctatggctgaaaaagagtctgctgaccaactgcactaagtctttataaatcttacaagcctccttagttgggggctttttagtaattaagggagataaaatgagtaatattatcgcatttactggaaaggcacgttctggaaaagacacctcatgttctattgtgaagaacatcttagaggatgagtatggctacaatgttgctgtaatggcctttgcagacaaccttaaactgtctgcatcaaagatatttgacctgacttggaatgacctgtatggtgaaactaaagagactccacaggtatttgacttatcatatcctgaactgatgtttaaagttacggaagctatggagttcaccttcagagatgaacgttaccatatggacttcaagcttatgtcagagttaaccggacgattaatcatggagcttaagaaggttgctaaacctaccctattaacacgtctgggatttagtaaaaagtataaattctcatcaagacaaattcaacagatttggggtactgaagttgtccgtaaagtaatgggcgacaagttctggtctaaagaccttgaaaaaagaatggttagattccatgaaatgtgctcacttagaaatcaatatggttttgtcttaatcagtgatttaagatttgactctgaagctgaatggctgagtagatttgcacaccaaactattgaagtaaaaagagacaatgtggacaaagtttcatcacatgtttcagaaaatgggatttctacaaaatatgagcgtgacattattcataataatggtactcttgcagaccttgagaacaagctaagagccatcattaaagtttaaaagagagaatgaagatgagagtaaaagacaattttaaagttattgaccaccgtttagtggaactctcatctctttccaatgaggtaatgattgaacgtcttaagagagttgaatcacgaaggaaagagattgcagatgaaattcatgaactggacaagattgaaaatggattgaaggcagaactacaacgaagaggtgctaatgtctaaaggtcgtaaattgaaagaggctggtcagtttattggtcattgtgcatgtccacgttgtggttcatcagatgctggttcaatctatcatcatgacgatgattcttattcgatgacttgctttagttgtaacaaaggtttcccagagtgggattttgataaaggacaaatcgtgagcacttattctactggttcagacaataaaaaccgtactttccgtggaatggatttagacgatgtaaaagaaaaccttgaagcaatggacttgaaagacaggaagattcctgcaaaagttcttgagcgtttgggtattaaggttgacattgacagtgatggtgaaattgacgcgcatttctacccaacttacaaacgcaatgaagatggcaagctagagcatgttggctaccgtgttcgtcaccgttacccagaagaccatccaaaagaacacctacgtggtaagctaaaagacttttcaggtggtgttggagacattaaaggtgaactggcaatgttcggttcatggattgctccagaaggtggcaaccgtctattcatctgggaaggtgagatggaatgcgctacagcaatctacatgacttctctggcgattaaagataagtctcgtcgtaagaattactgtcacgtatctgttccatcaggtgcaaacattaagtctatcaaagacaactatcagtacatcacatcgtttgatgagatttacttgtgctttgataacgatgaagcaggtgctaaagctaccaaagaggctgctggtatcctacctattgagaaggttcgtttattccagtatccagaaggtgtaaaagaccttaacgaatggtggacaaagttctataaagagaaagatacagttctggaaggatttaagcagcgtatctacaacgcacctcgttactgccctgctggtatcaagaactttgcagatggttttgaggcaatgaggaatcgtggtcagattccattgattcctttcccagagtctttcggagatttgaacaggctgacttatggtggttatggtttaggtgagattacaactattgcagcaccatcttcagtaggtaagtcagcttacactcgtgagatgatttattcagcttggaaagaaactgattataatatcggtgtaattcctgtagaagatacctatgaagagttgatggagatgctctgtgcaattcacctgagcaaacagatttctgagattccttatgatgaacgggattgggatgaattaaaaggagcacacgcagaactatctaaaggtcgtcgtatccatatcgttgaccatcaaggggcaattgaccaagataacctgctagagtttgttgactatcttgttaacagtttagattgcaagattatcattcttgaccctatcacgttagccctgtcacgttcagatacggatgaagaggaagttttgtctgagctattgcgtcgttgcaaacgctaccagtatgcgcaggtaaacgtatgtcacgttcgtaagagtgcaggtggtcagaaagctaactctgaaggtggggatatctctgaagaggatatcaagggttctggtgcgtatttccagatttccatgaataatattttgttaatgcgtaacaaggttgacccagaccctgttaagaaaaacttgacaaaaatcaagttaactaaatgtcgtcgtcacggtaagtcaacgggtattgctggtcatacttggtacaatccagatacagggcgtctcattaaagcatctggttgtggagttgacattgatggtgcagcagaaaatatccgtcaacagtttggtattggtgaggctgaagaccattacgatgactctttgccacattatgaggatgaagtgtttgaccgtgagactggtgaagtctatactgatgagcagcgtcaaagctcaacgattccacctgtattaagtgaggatgcagatgactgcccgttcgaaactgagtgatagctataaaagagaggggttcatacccttctttgaagaaaaaagtttaaataaatttcaggaagagtgtttgacaaaggttgataggttctatagaatgctctacatgaaatgtgatggtggtgtcgaagtagagaaaaagtcctatcacaatactgtcacagtcatcatcactatacctgaacataatattggttggctgtttgtaataaaagaaaatgtgtttgaatatcaagtatatcggagaatatcatgaaacactctaaagcatttgaaaaagtttttggggattccttaaaagtcactgctggaaaaccagcaaaatactatgaagagaagcgtgtaagaactggaaaaactgcacgtaaagcagcttctaaagataagcacaacttccagtaattaatgtttgacaatagagtatcaacaaattagaattggtactcttcataaattgagatagaggtttaaataatgtctaaagttgttaaaatgaaagctccggtagagaagtacaacggtactgaacgtcaaactctgcgttaccttctgaaagatgtctggttttattacctgaacacttcaccacgtccgggaaaaggcaagtccattgataagaaattcccaggcaaagactgtaactacagcgtttcaattctggcagaagatggtaacaagctgtttaaagagtttactaagtctaagaaaaacccagaaggttgggataaagttaccactgaagcagttgatgcagatgacttcgaagagaagtttggttgcaaaccaccatttgaagcagacacttactacatcttgaaagtaagtcgtgcagcagcttataaagatggtgctgtatggacagctaaacagtcattccctgtaatgctgattgaagaagtaaatggtaagcgtgtagctgttaagcagccgatgaagaaaatcaaagctcaagcatctgacaaacatgaagatgataagaactatgatgtaattcatccagatattgcagttggtaacggttcttttggtagtgtgattctttctactcacttctacacttttgagaacaatgtcttgacaaagcctattcaggaacagtttatcattgatactcttgtaccttacactggtggtaacggtgctaacggtgaacctgaactggatgaagatgaactggctatgcttggtcttgatggtgtcgaagataacggtgaaatcactgaagaagacgcaacagaccataaatcttcgaatgattctgatgatggtgacgatgaagacttgccagacccagatgacgaagaagatgaagacttcgatacagaagactaatctctaaaagttactttaaagccctgtacttagtatggggctttttcatatggagagccataatggagaagtacacattaacaaagcttcccgattcagttacacatatctttattgactctgacagcattgcctataaaggtgcttgtgtagttgagaaagcaaagtataaatacgttaataaactcacagcagaagaatctgaaccatttgataatgcgaaagatgctgcaagatggttagcagaccagagaatccttgtggaagagcttggcctgacatttgatgaagatgaatgggaaagacagacttggaaagaagctaagagtgaaaaagaagctatcatggctactcaacaggtgcttcaggaatggcttaaggttgttgggaaagaaagaacttgggtaggctatttaacagagaaaggtgtgcataaacataaagacattaaaggtcttgagcaccaatatcaaggtaaccgtaaagatgctgtcacaccaacacacttagtcgcttgtcgtgaatatcttttatccagaccagagttcaaactgattcttgatggatttgaagctgactctatcgttattgctaaagctgaaaagatgggaaaaaaagctgccttaatgagtattgataaagaccttcgccaagctgaaggtacttactgcattgatatgacctatgaaaaatcacctttaattttcattgctgataacaacgttggtgaaatttgggattgtccaataaaatcgacaccaaaagctaagaagacagttggtgtaggttttaagtttctttgttatcaagctgttgctggtgataatgcggataattattttggtttaaagggtgttggtaaggctgctgtgatgaaggctcttgaagggaaaacaacttacaaagagtgtcttgatgcaatttacgagttatatgctaagaaagactcctatacttatgtatcatgggatggtcagacaatcaccagaacacctttagaattaatgcagcaacactttttcttagcttatcaggaaagaaacaagaaagacgattttacttttgataagtatgggtggacaccaaatgttaactcaacaaactcttaaagaatacctgcactatgaccccgaaacaggggtctttacttggattaagaagtctgctaagcacacaaaaattggttctgttgcaggtacaaacttaaggggatacatcagaatctatttgtttggtaagggttattatgcacatacactggctgttctgtatatggacggttaccttcctgagtgtgttgaccataaaaaccatgtaaccctagataatcgctggataaatcttagggcatgtacgttatcagagaaccaatgtaataggttactcaataagaataataaatcaggtgttaaaggtgtgtactacaaaaaacagtatggtaagtgggctacacagataacttttaagaagagagtttacttcttcggcaactatgacacgattgctgaagcagcagaggttgtaaatagggaacgccaacgtttacacagagagtttgctaataaaggtgatgaatgagaaaaataaaaggttttggcaattgccctgaatatggtcactggatttcactatgtggtgaagttgacccagcaaagcactttggttttgtctacctagtgtactgtaaaaagactggacagtactatttgggtaagaaacagcttaatagtgtgaccaaaagaaaagttgctgggaagactcggaagaaggtagtcactaaggagagtgattggatgacttacgaaacctcttctgagtatattaaaaaagatattgagagctttggaaaagaattttttgacttttacattattcagacctactacacaaaaggtggcctagtctatggtgaagcaaaccttcaacataaattcgatgtaatgacaaaaaggattgactcgaagctcagactcttctacaatgccaatattgcagcaattaagtttattactaaagaaacttatgaagatgctgaaaaaagaatccataaggtaatgaaagcaaattgtgcttgataactattgagagagaataaaatgtttaacaaaagcaaagctgtgagtcatgtagcaaaagttgacagcaagattgaagaacttgagcgcatccttgcaaatgctagagagtcaataatcaaagaagttgaagctgttgaatctcaaatgcagcacctaatgcttaaacgtcaagagctacgtgagcatctagaatatattgaaacacgagagctaaaagttaacagatattttaaggagtccgaatgtttaactcaagagaatcagtaaaaaactggaaccttcgttgtggaaacactcaaaagcaaccttacagtaatgagtattgggaatctttaaaatctcaatctctgtgtatgcttgaagaagcaaaagagcttgtaaaagcaattgaagagaaagaccccattgagacactggatgctcaggcagatttacaatatgttcttgacggtttgatttacctgtcacaacatgaccataacggtgctatggaagctgtttgccataataatgacctgaagtacacagatgactatgaagaagctttaaaacgtcttgcagacattgaaaagcgtactggtcaagagtgtattattcgaatgtcagtggttgatggtaaagagtggtatgcgattgtccgtgcagccgatgggaagattatgaagcaatcaaatctccctaaagtacagcttggtgaatacattgtagagcttgaaagccaagaactttttgtggtagtatctgagacatgcgttatctgcaaaggtattgtaggtagcttaaaggatttgggtgtagatggttttgtagaagttaatccaattacctctaaagcagataaagacttctgtaaagagaatggactatggattgcagatattgtctactatgatggtgagcagttccatgtaacctcatacccgaaactgaattatgatgctaataacctgaagtgctggttaaaaggggttggttataatggattcacagaacattaataaagaaggtgtggctcagaagagccacttctcaaactacaatatctctatgacggtgtttatgaatgacccgttacttgagaagtatggtgagactccagatacacttctggataatgaacaagttttaaaagcagtcctgtacaaatacgggattgatattgagaaagagtattcttttgaaatctgtcaacacaggaatacttttggtaaagttgtaatggctccactcttcatgggtgtagaaagaactgactatggttggttatatctaaaaagaaacttggagaaataccgtgtctaaagcaaaaaagctatcttatgatgacattatctcaggtgctaaattaggtgttgatagtatcggacaagatgttaagcacggagacacagttatgtactgtgacgacagaagaggcagaagtgcaatcttgtttggaagaattgtttgcaagatgcgaggcaattacgttgttgcagacatggatgtgaatgtcacacaaaaacttgaaacaattatggatgctagtacaccgtcatggttcctaaattgtatgcacgcctcttcagtcacaaaagtaagtgataagttttacgatatgtggcagaatgagcaaattttcaagatttaaactagggagcctcttcggaggctcttttcatctgtaggattcaaaaatgattaagacaattaaaaaatcaaacggtacagtagtaagctttgacccagaaagactgaataagtgggcatcatgggcagataagcgcggaatcatctggtcagaagtcactatggaagccatgaaacgtgtctatgaaggttgcactacaaaagagatgcaccaagccatgattgatgtttgtgttgataaacaaactcaagagtactcagatatggctggacgactgcttttgggtattatctacaaagaagcctttggaggctttactaaggttcctacgctgattaccttcgttaaaaatatggagagagcaggactttgggagaagatggattattcacaggaagagcttgaatacctgcaaggttacatcgtgcactcaaaagatatctcttacggttatgcagtcttgaaacagttcagagacaagtatggtatccgtgatattaaaacgggaagactgtttgagtcaccacaatttatgtttatgggtatggctatgaaagcctttgagaagcaaccaaagcaccgtagactgcaagatgttatcaagctgtacacttacctatctgacctgaagattaacgctcctactccttacctgaatggtttaagagccactaaatcaggttatgcgtcatgctgtttgattaaggcgaatgataccgctgaatctctcggtattgctgcaaaggttgcttatgatatgactacaaagcaagctggtatcgggatgctgatggagactcgcactattggtgatggtatccgtcaaaatactattgaacacatgggtaagctaccttattacaagcttgtacgttcatctgtagaggcaaacaaacagaagagtcgtggtggttcagctaacaacttctatactgctctagacccgcagattgaagatttactgcgtttgaagcaccctacaacggttccttcgaaacgtattaacgagatggactactcatttggtacaaatgattatttctggcagtgtgttcaatatgatacggattggttgctattctcttacaaagatgcaccaaaactctatgacatgttctacacagcatctgctgatgagtttgctatggcagttggtcacgcagtacattcaggagttaagcacagacgagtaaaggctcgtgaaattgccaagctgtttattcaacagcgttatgctacaggtcgtgtgtatccattcttcactaacaatgcgaacacacatacaccatttaaagaaccattgaagatgtcaaatctttgtatggaaattgtgttgccagtgtatggttttgagaaagagacagacctttacagagacgatgctgtgaaagaggatggtgaggtggctctttgcttcctagctagtttggttgcagggagaatttcagaagatgaatacgctgacgttgcttattatgctcttgcaatggttgactccgttattgaccttatggattatccgtatccgtcgatgcgtaaccatgttcagaagcgtcgttctgttgggattggccttacaaatgtggctcattaccttgcgaagaactacgtgaactactcttcacgagcaggtaaaacgaaacttcatgaacttgcagagatgcactcttactatctgcatgaagcctcgctgagacttgctaaagagcgtggcgttccagaatacatgaagttcactaagtatcctgaaggctgggttcctccaaagacagctaacaagaagattgatgaaaagcatgatgcgaaactacgatatgattgggatgacttagcacaacgtatcaaagagaatggtggaatccgaaactctgtattagaagcttacatgcctaatgagagttcttcactagcaactaatacgacaaatggcttgtatccaattcgtgactttattttaactaaaaagtctgcaactggtaacgtgctgtttattgttccagattatgaagagttgaagtatgtctatgaaattgcttgggatatcgacacctttgatatgattgactgttatgcaattgttcaaaagttcactggtcaagctatctcttcagacttctatgttgactacgcaaaagctaagaaggtatcattggctcaagctttgaagtacatgatttatgccaactcggtaggtatgaaaaccatgtactaccttaacagccgcattggtgtaggtaaatctgcactgcaagatgcttattgcgagggttgtggtgtttagttttaacaactatgagggtcgtaaaagaccctctaaaaataactttggagagaccatgaaagatttaatagaaaaacatgagcgaccaatatacttgctctacaaaccccgcaaagcattgtactatgtgagcagcacaggtatcatgataaagcagaataatgacttatgggtcactggagcctcttacatctctacagtagatggtaaaatctacgcaagaccttatgagatgtttaacaaagaaaattgggaagttttagacagaaaacaagccttagaaatgataaagaaaggagaaatcacgctatgattaaccagcacccaatctttttaggtggcgagagaaaaacttttgactcacttaacaagcactacccaaaaatctttgaactttataaacaacaaaaagcacaagattggtcagaagatgagttcccttttgaacaatcacgtcttgattttgagagtgtcccagcatcaatgtcaggtgtaatgcttgagattcttaagtggcaatgggaagcggatactcaagttgctaagagcttggcatttgcctttgcaccatttatctctgatgacatctatgcaactgcaattatgaagcagtctgagattgaaaacctacatgctcttacttactcagagattgtaaggcaatgtattaaaaaccctgaaacaatcttagatgagattaaccagaatgttgctgtgcaagaccgattaaaaactgtgaatcgtgttcttgaagaattactggatgaaggcataaactatcgtctcagttatgtgcgtgactcacttctggacaaagacccattacacttccataaagtgattctaaaaggtctatttgcagtgactgcacttgaaggcatttccttcatggcatcctttgcatgtacctttgcacttgatgctcaggataaatttcagggtattgctcaagctgtccagaaaattatgcttgatgaaatccttcacaccaagattgatattgaagttttaaaagaaactttaagagatgatgagtggcagaaagcttttcaacaaattcttccagagattaaagtaatcttagatgaagtagttgaaagtgaagagaaatggtcgtattatatcttctccgaaggacgtgctgtagttggcttaaatacaaaacttcttcatgagtgggtttactataatgctgccccactgtatgatatgtttggcattcccagagattttgtagctcctaaagaaccacctttgaagtatatgattaagaagatggaaattgataaagagcagaatgctaatcaggagcaacagaacggtgcgtacctgttgaatactgttgtagatgatttgaatagtggatttttagaggttccttaatgacttatgtgatttactccaaaactggatgccctcagtgtgagactgcaaagaattttgcaaaagctcgtggtattgaccatgttgtgagaatgttagggcaggactatgaactgtcagacctgatggatattgcacagatgccagttcgtcagatgccattcatcatgaaaactgatggacaaaacctaaaacctgttgggacgctacagaattttatggcagaggtgaataatgcttaaacgcatttgggaaggtttggttgtcgatgcaccagctattgtgattggtatgctgattgttaacctatttactgattttgaacaaggttcattgtttggggccatgttactatgggttatctttgaaatattagagatacagttaggtatcactgaaaaactgagaaaactctttgcgaagttttctaaaaagatttaaaatgaaagggtctcttcggagacctttttagcatgtaaaggggcaataatgaacaaagtacagattattaaaaagaatggctcacttgaagaacctgatatcaaaaaagttttagcagcagtcacaaagtcagctaacagagttggttataaagagcttccaccagatgttactcaagctcttgagtcagcatttatgaggattctggtaaagtccactaagcagaataatttgctaatttctgtaaatgatattcacagtattgttgaaggtgctttggcagaggtcaatcacgagatttatgagtcttactcaacatacagaaattaccgtaaagaggttgctcaaaattgggacgaactctaccagaagactaaagatacactcttcttaggtgaccgtgaaaatgctaactttgacagcagtttaatttctacgaaaggttcaattatccgtggttacctgactaaagaaatatttaaacagtatcatctaacaccagaggaacttgaagccattgagaaaggctttatctatatccacgatttgagagacctgatttttggtggtattaactgttgcctgtttgacattggtaaagtactaaaaggtggctttgaaatgtccggcattgagtactgtgaacctaaatctgtactgtcagcgttgcaggttattggtgacgtagtactttcagcaactgcacagcaatttggtggttttactttagcagagattgataaggtacttgtaccgtatgctaagaagtctctacgctatcatgctgagaaagcatcatcttatggtattcctaaagagcattaccacaattatgtaatggagcagctacagattgaactaactcaaggtttccagtcacttgaaatgaaactaaataccgtaccttgtagccgtggggattttgcatttacaactttgacattcgggttacttgactcagatatgtctaatgaagataaccgactgcaatatatgattgcaagtactctcctagatgttcgtatgaatggacaaggtaagagcaagaaacctgttgtattccctaaactggtttatatttatgaccagaagagacataatgagaatatctgtcaaggccacctgtacagtaaagctatagagtgttgctctaaagcgatgtatccagatttcttaagtgtatctggtcatggtgctgtagcagaagcttttgagcgttctggcaaggtaatctcgccgatgggttgtagagccttcttatctccatatcttaacgaggatggggaagagttttacgttggtcgtgctaacattggtgctgtatctttgaacttgccaatgatttaccagtactctaaagagaatggtttagatttctggaaagagcttgataagtacctagagatgattcgcaacttccacaagaaacgctacgaaatgattgctaatatgccagcaagttctaaccctcttgcgttcacacaaggtggtctgtacaaaggaactaagaaacctactgacaaggttggttgggatattgtgaagtccttcacagcttcttttggtgttactgcgcttgatgagttgtctgttcttgctgaaggtaaacgacttcatgaagttggaagctatagttttgcatatgatgttctggcatacattaacatgaaaaccgaagagtttaaaaatgaagatggcttcttatatgccgtctatggtactccagcagaatcactttgtggaactcagttaaaacagttcagagatatgtttggcgtcattaaaggtgtctctgacaaggaatactttacaaacagtttccatatgaatgttgcagcagacatctcaccatttgagaagcaggacttagaagagccattcttccatatctgtagaggcggcagaatccagtatgtaagggtagctaacccagaaaacttgccagcacttaaaagttgtattaccagagggatgttgaagggtttttatcagggacttaactttgacttagcaatctgtgaacattgtggtaacagaccaaaggctgatgttgaagaatgtgaggtttgccattcacacgacatctctgtgattaacagggtgtgcggatatcttgggtggactaagattaaaggtgaatctcgaatgaatgatgcaaaaatcgctgagattcgtgacagaatttctatgtaaaacttgacaaggtgatgtgggtcttgataggcttgcatcaccttttttattggatgttagatatggcagagaacatcattggcctattcataggttctgtcttactagggttctttttaggactctcttattgtgaattgagagataagttaaaatgtttaagatatcaaaaacgatgatatacatactccacattctaatcttcttctttggggttagtgttatgttatggggtttttcagacccacaatggagtttatcatatcatggtcagatggatttatggtcatgcttcaaaccatttttagggttagctatagcattcagtgcattaccaactaaggtgaaattatgattaagttaaaccaaaaacagttagagtggattaaagattacgcctcagagtgtggctcttgcgaaaagaatcacgtaaaatactcaacattccatacggccttcacattgtatatcagcgacaacgttctaagcgattccgtagaagatggtgtagcattgcctaatgaattgcttgataaattagctgtagtcactggaacgtggagtgaagaagatggtcacgagctatctgacgatgttgtcttctacagtcttgaaaatattatgaatccagagtacattatgctaatgacttgtgcacaagactgtgtgccactacaaaacttcattaaagagcactgtgaagaatttattactaaacaggttccttgtcaggtggtgtttgaatgagtaaaacaattcgaagaaaaggtttaaagaacgttcatggactctatgagtggagaaatgaggtacgtaacagagaaaatgcttcagatgtctacttccattctgatatgatgtccagaaaaggtggctcttacgacttcacaagccagccttgtagagagattaagaaggccactaaacgtcttacaagaacacaaataaggcagctttctaagacatccttcttagatgaagattttgatattgatagcaagtctccaaagaaagccgctaagaacacttatatgtattggtgaggtaactagatgaattacatggagattcgaccatttgacacagctaatggtgaaggggttcgtgtaagcctcttcgtagctggttgtaagcatcactgtgaaggttgctttaataaggaatcttggaagtttaatgctggtaaagagttcacttatgcaaacctctatggcatcattaaattaatggatgataatgccgtcagtgggttgtcaatacttggtggagaacctctggatgatagaaatattcaagaggttaccaacatatgcaaacgtattaaaaccgtttacccagaaaaatctatctggctatggacaggttttcagttacacgaaaaaattcacctagatgtgatgaaatatgttgacgtggtgattgatggtaagtatgattcatctaaaccaacagttaaaccatatcgtggttctgataaccaaaacctctggagaaaagagtacggatggcaaggtgattgtcagtggagagcagagtgattattctggcaaatggactaaggtataactccaattggtatcactgaagaagaacttcataagttctgtattaaactttaatgagagagactaaaaatgggaattttaggtaatatgaaagctggattcttgaaggcactggaaaaagcagcagcaattgtttctatgactggaaagcaggtcggtgtagatgcttcagcggttgcacaggttcttgcaagccaaattgaacagcagccttacatctacgtaggacgtggtaaaggtggtaagaaacaagcccaccgccaatctggtgcagcagctattaaacgagcagctaagaaagctcgtaaccgtaaacgtaacaagaaggttaaataaccatgagcaaagtttataacactcgtaaattacagattttcgtactgtgccagtttatggctaaagaatacaacttctactattgtggtacaggttttattagcgatgatgatggctcatacctcccattcaaagaagctgtaaaactctttaatgaagagaaaagctctaagaaagatattgaaaaggttaagctaacctacagcaagaaagataagaagattatctgcctagataactttgtgaaagttactggagaagcaaaagagtttatggatgagagtgatatttcattcacaagcatcttgaaagtagctcagtaaacagatactataaggggactgtaaaggttccctttttattttggaggtaaaatgtatctgtcaaacctgaaacgttcggttgcaatgtcagttctaagactcagctttgatgagcgtcaagagtttatagactcccacaaatatgacccttcaaattctaatcacatggttctttggaatcgtgataacttccgtgaaagagcacttgtccgttattacccacactacacaatagataacctgtatgaatggtgtgttgtgaagaacaccattgcaacactgaacaatctttgcaggtatacgggtaagcaaacatttacattaggtcatcacaaacctgttacaaaaggtggtgaacatcactgtgcaaactggtttatccaaactaaaactgataaccagaagcaaggagatagcctcctaagtatccctaagatgacctatgaagagcaagagaaatatatcaaaaataatatgccagatgtgcttgacaacaactatacagatttggcaatatctctcctgttgaagttcgagacagtttatagggcaacttataatggctaaagaaaagtgggagattttaccattagtcagtgaaggtggtaatggttgtgagatgtacatgatacgtggtcatgttccagaaccaattgcacttgagatggtaaacaactttacagatggttcttacaaagacttaggagagccaactataaagcatcaatgggtaaagcctgtaccagacagcacaggtaactgtagtgtactttaccacgttgtagaccctgtaaaatgcaaatctgcaatggcagtaacaaacgtaacctttgattgagatagagagaaaactatgaaaactgttattgaagccgtcatcaccgcacaagagaaattcttccacacagaaaaatttaatatcatccaattcccatctggagaaattggtggaaacttctctgaagattttgttaagtttgctgagcgtaatgctggtaagattgataatgttatatttactgtacaggggtatgacaaagatacactgtttgcattagctttggctaaggatgccgttgacagtcttgttccccagaaatcagcgatgaaaaccgttgttttcgggttcttaccaaatgctcgatatgaccgccacatgttcaaaggtgatgcagcagcactgaaagtctttgccaaccttgttaatgcaatgggttttgatgcagtatgtgctcttgaccctcacagtaatgttgcagaaaacttatttaagtgttttcagagcatgaagcaaaaagatgtggcagtacactttgcaagtgacccacgcattgatttcttagtagccccagatgcaggtgcagctaagaagactgaagatgccgctaaagaggtagataaaccatatatcacaatgtctaaggtgcgcaatcttaagactggagaaatcactggtatgcgaatccttgatgatgttgatttgacagataaaactgtcatgattcttgatgatatttgtgatggtggtcgaaccttcgtagaagcagcgaaacatcttcgtgaagcaggtgcaaaacgtgtggaactctatgtaacacatggtatcttctctaaaggtgttgaaaaccttcttgacaatggtattgaccatatttacactacaaactctttaggcgaagctaaagaccgtggcttaacacactatggtcaagttactgtagcaaccattgattaggtaacagtatgaataagggttattttgaaaaatacctaatatatgaaccagatacaggtttattaatttggagagtaaccctttgcagtaccgctattgctggtaatgtggctggcacaaggtctaagaagggttatatccaagtccagataaataagaataggtactatgcacataatattgcatggattatgtctggaggtgagataccaagtggatatgagatagaccacatagaccttgataaagctaataataagttggagaacttaagacttagcacaaagtcacaaaatcagaggaatagaggtatatacaagaataataaaactggtgtgaagggtgtaagtttttgtaaacaaacaggtctttacaaagcaagagtcacgctttaccataaagaatacttttgtggaagatttaaaacggtagaagaagcaaaagaagctgtaattaaaaagcgaatagaacttcatggtgagtttgcaagacataactaagagagagataaaatatgagtaagtcactttacgcagtaccagcaggtcttaatgcagatgcttacaaggcatcacatatatatcagtatccagatgctacgcaatatcttatgttgaacctgacaccacgtagtgacaaatggtttaacagtccattagcaattgatggtgtagtcgcttttggtattcaacgttttgttaaagattacttgatagaccactggaatgccaccttctttgaacgtgacaaaaaagaagcaattgacgaaatcttagaagtcatgaacggtgttctgggcaaagatgctattggtcgagagcattgggaagcacttcacgacttaggttatctgccagtcgaagtatacgctgtagaagaaggcacagttgttcctatgcgtgtcccaatgattgtcttccagaacactgtttcaggtttccattgggtagcaggttatctggaagatgctttctctgctgagatttggaaggcttgcactattgcaactattgcattgcattacaaacgcatctgtaagaagtgggctgaccttacttgtgacaacgacttgcatctgccctatcagtgtcatgactttgctatgcgtggtatgtcaggctttactgatgacgcatttaatgctgtaggtcacttaaccagctttaaagggactgatagcttccctgctgtatacacggctaaacgaatctatggacagtcctacccaatctctgatattggtagttctgtaccagccactgagcactctgtaatgtgtgcaaacattgcttgggaaggtggtaatgagttgattgaagaagaaagacgctttaaaggtgagttacaaaccttccgtcgtttcttaacagaaacttacccaacaggtattgcaagcattgtttcagatacttataacttctggagaactgtgtcagaaatcttaccagcacttcgtaaagaaattatggaacgtgatggcaaactggtaattcgccctgactctggagaccctgtacatattgtcacaggttataaagcaatccacttagaatgtgctaagaaggcttattacgagcacctaagcaagctggaagccagtgacacaatgttgaatgctgttctgaacatgaagcttgagaacatcaactatggtattgctggatggctactgtcagaaggctacgagatggttgttgacagagaagactttgaagttgctgatacagtgatgttgaaaaatgcttatatggttggttctgcaaacgttgtaacacgtcctgtagctgagattgatggagctattaagacactgtacaacatctttgggggaactattaactctaaaggctttaaagtactggatgagcatattggacttatttatggcgactctatcacgttggaacgtgcaaatgaaatactgaagcgtttgtatgaaatgggttttgcaagctctaacgtagtgtttggtgtaggttcttacacttaccagtacatgactcgtgacacctttgcatttgctgtcaaagcaacccttgcaagcattggtggtaaagagattatgcttgcaaaagaccctaaaacagatagtggtgttaagaagtctgcttttggtggtgtagcacctatgtgggatggtgaaaatctgaaagctgtagatggctatgggttccagagctttgcagatgcacttgaacatccagcttgtgctttacgtctagtctttagcgactctgagcagttcggctacacaactcttggtgatattcgaaataatattgacaagcagctttaaaagtatatgataagaggctcctacgggagcctttttaatttctggagaagattatgaaaatcaaagagatgaacatcaacatcgtcttagaggaacgttgggagaacatcaagaaacctgaaaatggtcataagttccttaacaaaattttagtagcagctaaagaagaactgactggtaagattgcagcagcaatcacaataaaggtctgtgtaaaaggtcttccagacaatcaccaatttgcacttgacgagtttaaagaaagcttctacaatccaaataaacagatgcttgaaagtaactttgcagtatctacaagtatcgtccatgacagaagctttatcctttacaagaatatgagaggtgagtcatgcaagcatattggatagaaattttactgtcacttggtggcgtagcagtgtttgtttaccttctttgtaagtactatgcagagcacaaaaaatgtgactactgtaatggggaaggttatacaagagcaggttgttgccctatgtgtggtggttctggtaaaatgtttaacaagtaatttaacagtaaactaagaggaaagtattatgcgcatggtaaacgaccacgcagaagtgattaagagttcaacttctttagagacgtctcaagcacagattacaatgacacctgagatgttcagccttttgagttctggtgtatatacctttaaagaaagggcagtgattcgtgaactgtcatgtaacgcagtagatgctcagaaagaagctggaaaagagaacatcccattccatgtgcatttacctactcgttttgagccttacttcgaagttcgtgattttggaactggattgactcatgataaagttatgagtttgtacctaaactatggagcttctacgaagaatgactctaatgactacattggtgcaatgggtatcggctcaaagtcaccatttgcaattgctcagtcattcacagtatctagctatgttgatggtgttgttaataagtactctgtttatcttgagaatggtatccctcaagtaactaagctgacaactaacccaacaaaagaacctaatggtttagctgtacgtgtggcggttgctgaccaccgtatctcaaagttctttgaagaagctgggaatgtgtactcatacttcactgtaaaaccagaaagtaatattgagtacgacgatgtattagcagatatgaacgtcattgcccgtgaagaaggtgtttatgatgccatgattcataagcacagctggcgttctagtgataacaggacagagtttaatgtggtgatgggtaacattgcctaccctgttaacatggaagcattacttggtgatgatttcttcaaagtattgccagaatttttccgtaggagcgtagaccttgtaaacatctacatgcctattggttcagtcgctattgcagcttctcgtgaagcattgcagatgaatgacacgacaaaaaatgttatcattgaggctactaaaaagataactgaagcaattacaaaggatgttatcaagaaagttaacagtcaacctacactcatggatgctgcacaggcttatgctgagttacgtttgaactcacgagagatgtttaatgctgtgtgtccaaagttagagtggggaggcgttaagcttgattctctggaagaagaattactaaacattcgtcgtggaattatctacgcagaagacggctcagtcatttatgaacgtgacggtaaaggtaatattaaggttgataggaacggaaacaacatccctaaagtagattatctttatgacccagttgcttatgtcaagttcaactctttagagagtaagattcgtgcaacagcactttcctacactcaagaggcaagtatgttcaatatctttggcgcaatgcgtaaaagccaaattgaacagtttttgtttgttataaatgaccgtcgcaataaaaatggtactgagaagactgtaggacgcaaccaaatcttgcgtggtgcatgtcgagactatgccagtgagtcaagtctgtttcacagatacaatggtattgtctttgtattctcgactgaaaaagagttagatgacttaatcaatctgcacaaacttgataaaagcttgttaaagattgtgaaaatgtctgataaggaacaccattaccagcgtaaagaagctgtaagaggtgttgtaaaactctggaaagctgttccagcagaaggtgtagcttcctataaagaggtttcagaggactttgatacaattgaagagcctcagctttacattaaggcagttggtgatacagttgatggtagatgtttttgctcatctccagaagatgtagctaagtcagttgctaatgttacaggtaagacagtctatgttttccgaaaagcaaattggaaaaagataccagaagattggattgaagtagatgagaaactcttgaacgacagcttaactgatgttcactggattaaccataacagatatatgacgcgtatctatatgaatggtgtccttgaccttacaagcagttggattattgccagaaactttacgtttaataacaggaagatttctcgcgggtattgttattcaagggatactattaagacaatcttcttagaagggaatgaagatgctgttgaggcaatgtttggtaagattcagtatgtggctgcaccgtttgcatacacttacactatcagtgttcttcaggatttgaagtcatgccttgataatgacacaaaactgtacaaaaagattaagaaagcaggtgaccgcatggttatcaagctgacaaactatctttcaaaaagaaaacaagaaaacttcttgctttcacacttagattggaataaagtatcacctatcgaagtgagtaagtttttaggctttgatgtgaagtgtgttccagaagggactacaatttacgattaaagtgtttgacaaggggcttcaaagccccttagaatagcctcacaaattgattgattaactaacaagagagagtaataagatgactactaaaactaaagcacagattgacgcagaaatttacaaactggttaaagaaggtaagctgaccaaaacagctattgcacagaaatttaacacttcaacccgttcagttggtcgtgctgtagagcgtcatgaagcaaccttaaaagggaagaagaaggtgacttctacaccagctacgaagactttgaagcaagttgctaagacttttaaaaagaaagctggcaaaccagttgaaaaggtcgttaaagacgctgtacagaaagctccagtaaataaactgcacgaagctatgcagaaagatgacaagattgagtacatgattactggtgattctgtaattatgacttatggttcagaatctgaaattgttgagtctactcatccgaactatcaagagattgtagttcatgttgtgaaaggtgagttcaagaaagcatttgaactgatgaacattcgtaagtctatcgaaaacttcactcagggtgctatcacaatcaaaggcgacaagctattctacggtgctgttgagatgcgttctactctggttgaccgtattcttcacatgatgaaaactggcgataaaggttttgaacgacttgtaatgttcttcgaaaaactgatggaaaacccatctaaagattctgtagaacaactttggggatttgtatctcaccttgatgttgaaattgatgaagaaggctacatcattggttggaagaaagtctctactcgtgaaggcaagctggttgactctcacacctacaaagtgcctaatgatttgggtaacattgtagaaatgccacgttggatggttgataataaccgtaacgtaacttgctctcaaggtcttcatgttggtgcttgggattatgttcgttgcttctcaggtgatacaatcctgaaggttcgcgtacatccacgagatgttgtatctgttccaactgattacaacgatatgaagatgcgttcctctcgttatgaagttgcagcaatcgttgataatcaacgtaaagtgctggaagcatgggacggtaagactgaagctttgcatgtcatcgttggcactgctggtgaactcatctctcaacgtaaacgtgaaatctaataagtaatttcttaaaaggctgcttcggcggccttttttatttgtattttgtgcagagtgctgtataattgttgtcacgataaactaaacaggagaaccaatgaagaaattgattctaggtttgtgcttaatgtttacagcacacttatcttatgcagttgactgcccagagctatcaattagccaaaaagtgaacatgttaaaagcttaccagtatggtgagaataacatggggaaaggttggggtatcactctagcagctatagccttacaagagtcagagttaggtctgaaggtagaaaataaaaagacccatgactatggtatcttccagaatcacttgaagactgttgtaaagcgtaacaaaattagtcctaatgttgctaaaaagaaactcttaaaagattttgactatgccgcaaaagaaacacataaagagcttgagttttggacgaaggtacatggtcacccaaagtcaaagaagactttacaaaaagttttagcatcatataatgctgggtattcgtacagaatccctaaagctaagaaatactctcaagatgtctataacaatatgaaagttatcgctcaatgtgaatttgcaacaaacatttctaaggtaaatcatgaaaaaattaagaaagtctgatgaagtcctgtgccacgcttatgacttgcatcctcatgagttaggtcttgattcctgtgtatggactccagaacagtgcagagattttgaagacactgcaagagaggttgtatgttcacttgaagagttccacacatcagaacccattgtgaacgttgtggacaaagagactggacaaactataggtgtaaggcgtgatagtttagtgatagtcaataaagaccttgtagaaaaaggtaacctcatcttagcagatattgatggtgttcttacaaattttaatcacgaagattgctcaacggaattgactgatgggtcattctcacagtacactaatcttcttgattctgtaagagcaaaaccaacatatgttttcaacattattgatgcaattgcaaatcatgcagcagttggactcttgacagcaagaggtgaatctcagagaatacctactgagatgtttttaaggcacaatatagagcatgattacttgctttttatgcgtggttttggaactaactctataagtgcagaaagtttgaaagtgaggatgattcagtcttgcattcttccttactttaatatagtatgctttatagaagatacagagaagaatgttcagaaggtaaacagaatccttccacacattaaaactatgttagttaaacattgagagaagaacttatgaacaatatcattacggtagcactggacgatacggcaaacaaatctgaagtagttcgtaaaatgattcaaggtaactttgaaggtaaaattttccgtgctgttaatgtaaaagctgatggtagcattcgcgaatatcgtgcattgttgaacgttaagaagcacgtaaaaggtgttggttcaacgactgcacacaaagaaaacctgatgactatctatgatatgggtaaggcttcagagttaggtgctgaaggtatcgttaaagaaggtgctccgtatcgctctttcaatctggaaactactcttatgctttcctttacaagtggttccaaaacaatcacttatctctttactgatgctgcaacggtatctgctattaaggatagcactgtcaaagctggcgtagttgctgctgcaaaagcttcttcgatggctgcgaatatccttgctaaagtcctcggttaaggttaagatacaggctccttcgggagcctttttcattttaggagattgttaaatgacatttaaagagttctgtcaagctactttcataattgttttcttagttggggcaggtgtctggggaggatactcttacagagactaccaagttgctgaaactgagctaaataatgagaagctgataagtgttgctaaagatgcttatcaggaaggtttagccacactcagcaccaattacaaaaatgatttgaaagacgtgcttgctaagaataagcatacaaaagaggtactaacgtatgaaaagactaagccagagttttataatgtttgtgttactgataattatgtcagggtgttcaacgaacaaagtgaacagtacattcaaaaactcccaagtaagtgagagtgacaagtacactcaagaagaatcaagattcactgtcaaaggtaatactggtagtgatgtggcagcagcccttgagttttatcgtgatggtttttaccagtgcacaatcaaagctaataaccttattgatatgattttattaggaaacaaacagcaatgacagagaatgaagacactttctatgtagaagggtacttactgctaccacgaccaaaagaaacttatatgcgggttgatttctcaccaaccattatggataacgtgatgtgtcatatctttatgcaaggtgtcacagcacagcttaagcatgttggtaaagagtgcaaaataaaggttgacactcatccagaaatcaaagagaatcactacacatggttcttaccagactctaaagaaatcttagcagttctcaaaacgaggaagtaactatgcagattaatggaagagactttgtagccgtttactacgagaaagataaagaagttggcgtagcacaagtatcttatggcaatggtaagtggttgtatgggacaatcgcagtagttggaacaagaagtgatacaaaaacttttaaagattgtgttgaccttcttgaagaatccatccagaatcattggtgtctgatatggatgactgacaacgaagtgatagaacgtttcaaaaagattgatatcaacattgacagtattgagcatgttgatttatatgagctaactgagaaggtaaactatgaaagctctagaggtaattgataaagacactggagaagttacatcagcatgtgttttcgttagtgacgacacagtgataccgttttacaatctcgataactttagtttcacagggataactccagaagaatactttgaagacctcacctttgccagaatttctatagatacattttataaatgcttctatgatgaaggcaaagaattacgagaaactgaactataaggtgtatattatatggctgacttctgcaaagactgttctatcgaaatgttcggacgtgatacaggtgacttaaaaggtcttatcactgaagatgactttaaagctggctatgcaatgccagtaatctgtgaaggttgcgggtgtatctgggtagaccacgaaggacaacgtgtaaaaccttcagaagataaagaatcttgggagagatgttaaatgggtattgtaaaagttgtaaaaggtaacttactggctgccttcaaaaacacagatattgagttaattgctcatggttgcaactgtcgtaacctcatgggtgctggaatcgctcaaaaaattgctaagattttcccaaaagctgaagaagctgaccggaaattccataaaaagtttggctacagtgctcatgatatcggataccagatggttggtgaggtgtcacatgctcgaacggagtatggttacatttttaacctatatacacagttggatgttgggaagtgtgcatcataccgatacttagtggagtcactagaaaaactccgtaaattttgctggctgcacaacattcgtaagattggtttacccatgattggggcaggtataggcggtttagatgcacaagctgtgaaaagcctcattaatagtgttatgtataacgttgatgtgtacctctacgtctatgatgaagcaatggcaagtgtagttacccctaagtatgctacctcagcaccacaattctatgatggtgtcgtgctaagtgacgggaagactaatcaagttaccctctatcagcttgttgatggcaaggttgaggttagttaccctctggttagtgagatgggtatgtgtaacagtgaaatgttcccagttgacccgtttggaagatatgaaggggtgttctttgataactacccagcagcatacatctacacaacaaatcaggatgaagttcactacttgctgtattctaaaaagttcaaattcataagctgattagcacttcatagtatctacaaatcatctaagaaggctgcctaacccattgaaaaatttaaggtaaggcggcctttttcattttcaatttgtgcaggtatctgtaggggtctgtacagatatcccaaaaaatctcatcgccggatagaaaaatcattttcaaaacgtgcagaccccgctcaggtcgggcaagaaaaatcattttagaattgtgcaggtaggtttttatagagagccagaccaacccctctccccctcttactccccctctccctaaaagtcaagagaaaaatttgtagcggattgaaaaataattcttgatttgtgttctgttttgtggtagtcgtgtgcgcccgtttcattacagttttgccaaaaatatttttaaaatttttcttgactctttgagtgtggttatctaatatttgcatcaacggggagggaatgaccttccccactaaataaagtcctaaactggagattcaaaaatggcttatcgtgcacctaaattcatcaacaaagacaactttcgcaacgcactggagaagtcacttgatgaaaattttaaaggtaacattatcattgttcacgcattcaattttaagtatgatgtaaacgggaatagaatcaaccattacacggcaaccatgttagatggtactctttcaagtgaaaaagccattttacatgcacttgctggacgtggtaaaaacctgataaaatgtgataagagacgttatcagggtggcgcatatggttatgatgatgctgtttatcatcttgaaaatatgggctataaagtagaaaaagctggagtgtctcaaataatcggtagtgatggttatgtaactatcttcaaaattaacaaataaagtactttacaaggggcttatagttcgataaagtaagccccagataaagagctttaccactaaatcctaaattggagaacttaaaaatggctattatcaaaaacgttgtaattaccgcaaagactcgtgatgacgctcgtatcatggctaaaaagttatgcgggaaagtggttgacaacggaaaacaatctgctgtaaggtggggcgtgaaggttgataagcagttgaagttaaaaaattcaccgataaacctttttacatgtgtaaacactatcgggaagacaagtgtatacacgaaaaaggcatatattagacgcgtagcattaacatcccccattcgtacaatgagaagttatgcaaagctgaaaattaacaaataaagtactttacagggggcttaaaagttgatatcttaagccccagataaagagctttaccactcaatcctaaactggagattcaaaaatgaaaactgtagacgctacctttgaagttgtaaaagaaaaattcactattatctacgaagcggtaaattgctttgaagcaagccataatcttgataattggaagtttacagatgaccatcaaggcggtgtgacgattaaaaatcctaactgtcagcgtaatgaatttaaatatgcaatccctttacattacagccttaaacagctttcaagtgactatgcaaaacaaggccgtgagaatccatcgaaagaggcttacacgagcttacagaaagaactagaaagagatttagaggcttcagagtataaccttgccgcgaaagttgtggatgcaaacggtagcacggttttagaaagtttttatcttggttatgctttcgattggtgctatcgtgacggcgatgatttagaggatagactaaaagaagaggtgaacaacgcagacgcagaatctgaagtattagaacgtttggaatcgttgaaagactcagtgatgaatatctttaagaactaaatagatttctttacacggggttatcagactgataagatagccccagataaagagctttattcaaatcaacccttaaactaggagattctaaaatgaaattatcaaataaagtccgtgaaaatttaagcaagttacttaataaaattgatttcattgaaacatcaaggaatagtcatgatgttatggaatggttacacggaaaaatcaaaggccgtcgtgtagtgatttgcttatggaacagttgcagggagtataaaaaacctgtattgcaagtcaatatttatgatgatacttttaaaagtcctgtaaagtctaaaagcgatttattagaatcctatgagataactgtaaatggcaaagtatcacgtaaagaggaaacaccatgttaatgactggtatcactgcaatcattgccattttcgcgctatataaggcatataaagcctataatctggcaagtaaggcaatcacacaacaggttaataataaccttgtaatgagctttctagagcgtttaagtgatgaacaattaaaacggctagaaatgagctttagattcagggcgagaacttatcaaatcagtgacattttcaaagataattttcaattagtcgatgattataattctctgataaatgctttaaatattagtgacttaaaagattatcacgctgtaattgttcaagaattgagcaaacgaaaacaaaactgttgacactgatttttagatagattaaattacacatcaacggggaggcaataacctccctactaaataaagtccttaaactaggagattcaaaaatgtatactactaacaacggtcgtactttaaatgtcactctacgtcactatgttgatggtgtaatgtgctttgatgatttacaagctgagcaacacatcttagattggcaagtagcaggactccaaaaaactgctaccggatacgggaaaaagattccaactagctggaaagtacactatgaaggccgtttgcgcagaatttatcaagatgtgcaaagcaatagcgcatcgagttacattatagtaaaaggcaaaaaactgcatttaatgtaaagtactttacaaggggcttatagttcgataaagtaagccccagataaagagctttaccactaaatcctaaattggagaacttaaaaatggctattaataaccgtgaattatcaattttaaaagcacgtttgaccgttaaccggattaatgttatcacgtcatcagcaccagatgaaacactgcaaaacattattgggaagattcaaagtgttatcttagacgttgaaagcgtaaaaaattcattggctgacgttgcagcaggtatcacactagacggtgcgcaatatgaaatgtccgacatgttaggcaaatctaaggtaatgaataaagagttagatttgaaaatgttccgatttgctgttaaagtgtggctatctgtcgagtatgatgctaactttgcaatcgctgactttttcgccacttggttgcagcgtaatttgactaatcatgacttccgcgatatctgtgatgcaatttatgcagaactctaaaaaattttgttgacactggtttttagatagattaaattacacatcaacggggagggaatgaccttccccactaagtaaagtccttaaactaggagattcaaaaaatggctattattaatgatttaaccattgaaactacacacatcaaagatatcaaagttggcgatatagtcctttcccacggcgtagaaaaaactgtcactgcaaaggatatcaaagaggattctttcatgggtaggactctcttcggtgattcttattgcttaggctatcttgcagttttaaaagttgtcaaaaataacaaataaagtactttacaaggggcttaaaagttgataacttaagccccagataaagagctttaccactaaatcctaaactggagattctaaaaatgatgaactactttaacattcccgatacctgtagattattgacacaagaagaaaatttgggtaaacctttcatttaccacatgccagataacacggcaaaaacttatagttacaatgttaaccgtttcaccgcatacgctgcaaagaacggctataggttggttactcaaaaagtaatgctggttacaactgctggcgagattcctacagttgcagtcaaactagttttctcaaagaaagttaaataaagcactttacaaggggcttatagttcgataaagtaagccccagataaagagctttaccactaaatcctaaactggagattcaaaaatgaaatgctatcacggaactactcaagaaaatttcctcaacctgattaataacggtgataaaccatcaggcgcatggaattgttcggatatggacggcaatttttacgtgtatccagaaaataaaatctatggcgacgatgatgaagagataacatcggaaggtattcagcaagctctaggcaatgccactatcaccgcagcttttcagatgaagactcaaaatattgttatcttagaactcgatattccagaggatgagctaaacgatgattattcttgtgataatatgtcgagtgtagcaagttttacagagtactttgatgtaaattggattaaaaaggtctatacaacagagtttaacgctatgtattcacctttttgtcttccttcattggataacccaaatttaaactatcttgatgagtctctggagcttcttgctaaaagtgttcaacagtcggacagtattcaggttttttgtgacatcatggatacactgacaggaaacattgcagaagaggatttaaagagctttttctaaaaacctatgcaatcaccttataaacactaatcagccccttgtaggggcttttagagggcttaaatcatgcttacaaccatttacctcatcctttccatctgtaatggccattcatgtgactttaaagggcttgaagagtttacaggaagtaaagaaaatgctattcaagtttgccagatagcaaggaaagactatcccgctagtgatgatatacaatgttactttaagacagaagatgacgacggaatctatttcgacagtgttgacggtcaatatgaaattgtcattgaaaaagactagacaagcccgataaaagtctgtaaattgtcaatcaacggggagggaatgaccttccccactaagtaaagtccttaaactaggagattcaaaaatggcttatgtaaccgtaattaccgataaagctggcgcatcttggtcaactcaggttagtgataagatgtcacctatgcagtgcctaaaatactttgaacagtggaacaaaggcgaggacacaagcccctttcaagtgatgcagattatccatgtagacaacgaaggaaataaaacgacgctgaatagtgagtactatgcaagccgttttgaaacgagaagtaaaacaatgaaacttttacgtgaatccggttatgcccatatcgccgcgttaatctgggatgacctgctaaaaagtcagcgtatcagctatgtaaaacctgaaaaaatattcatcagttaatcaataacttacaaaaaacttttaaaaaaaatgttgacaatccctcttgacattggtaactttgttcgagggggtttatctaaaagggatttacttaaaagattctttatagataagcttaaaaaattgcttgcaatcagctatcaaaacaagtaaattactaatcaacgggagggatgacctccccactaaataaaaatccttaaactaggagagtcaaaatgaacaaatttcaagctatcaacttcattcgttcaaatgctgtaatgtctaagcctgtaaaagatacatacgaattccgttgtaatggggtacatttcgcaacaatcaccaaatcagaaaacggggcttattacgttcatcgtcgtaatgtttcaaccgttgtagtctctcactttatgcaagctgtagcggaattattaccgttattcttagagatttacttagatgagtgtaaaaacgttcacaaccacgttaaaagccttttaaacggttataaaatggcttatgaacgctctatcaagtccttaaacaagttttacaatgcacctgcaaatactgtttcaatggcttatgatgtaaacggtgagttagttagtctctttaaagtggaagaaattaaactgtataatttacgtcctagtggttactctaagactcttggtgaaggtttatcctttaatatcaagaacttagaaaaaactttaaaagacattgaaaaagatattgacgagacaattaaaagtctgtaaattgtcaatcaacggggaatgaccttccccactaaataaaatcctaaactggagttatcaagatggaaaacgtagaattaaccacacttttacaaattgcaaccgacaaagaagatgtagcattatttcaccgtatcgaaagcgatttattcaatggtgaaatcatcaaagaatcttacgaagttgtcggattcaaagatggtaaagcatttggattctttgacctcgacaaaggcaacgctgttacaaagtacgatgttttgtcttgtgagattcttacaaaatacaacgaaaaaaggcttgcaacatacgccaatatgcagtaaattactaattaacgggggatgacctcccccactaagtaaagtcctaaactggagaatctaaattatgtcaactatccgcgtaactgttaatgcttatggctgccacgaacttgatgcaaaattcgatatcggtggaacaaataacacctttgaccttatcaaaatgctgattcagcaggtgctaccagattataaccctaccgatgacttttggaaggacgctgtaaaagaagccataaacgaggaatatcactaccactactggggagaaaaaattgtctccctgtactacaacaagcaagattataactaatcgacgcagcggggctaaatagccccagatacctgaaaagctccttctcataggggcttttttacgtctatgtaatagcctctatacaaccctttccctttcctttccagaatctatcccagaccttaaaagcaataactctatagtctactctataacctcttatcaaatcaacttaaataaaagccaataaccccagaaaggggatggcccatttaaacgctctataaagctctataacagccttatcaacctaacttaagggattgcattacctcacccttaaaagccctttataaagcttcccagagacttaaaagaatcttataagggtgtaagctttatcatctcgttagtattcttgtgaatatctaaaaagggcttgttagtgtcttaaaagtatgttataggggctataaagttactttgaagttacgtaaaagttacgtaaatgctagcccccttaacattttcttaacaatttcttaacaaaccctacatagttatgcttttaaggcacttgttagcaacttgttagccccttgttaaatctctgttaagaccacgtaaaaaccttgtaagagtctttgacatagcctttaaagcccctgtaaagccttataaagaggtatctgtacagttggggtgtaattactaggaagaggcttaaaagagcttacaaggagctatagagagcttttaaaaggtatgtttagagaatcactaagagggaaagggaacgataagaaaagagtagtgaccatgttaatagcttgttaaaaagattaaacacttgttaggaacttgttaattatcttaacaaaataactcttaaaaattaacttgttagctcttgttagtcatctgttaagactctgtaaagaccatgtattgactgttaagaacttgttacagccttgttagttatgttaagaatctgttaagacctctgaagagatgttaagagcttgagagagttgttaagagattgttaaggatattttaaaattttgcaaagtacttgtaagggagttgttaagggctaccaagtagatatacatctcctacagatatttttcagttccttcaaagaccctaaaaaatgacttgatagtcctattttataaaaattttaaaaatctgaataattacctatacagtctttctaaaatacaggtaataacaggcttataagataccttgttagtaccgtgttagaccttgtgagataaggtctgtgaagacattcctgttaagtttgttaaaacagtctatatagaggcttagtaatacctagtgaacacctatagagagtatcatagctgacatagagattaagaggtgtataggagcttctaagaggatgtagaaagatggttaaggtgattgtataggttgttaagaaggcttgttagaagagtgtttagatggctatttagaagggctatacagagggctattaagaccactagatagttactaagatactatatagtactatataactatatagagagtaagattaagaaggttgttaagaaggatagatattttattcacatatgatggtgacccagaggttgggacaaccgataaaattttataaaaattaaaaagcccccaattaaggaggctcttaagatattttaaatcagtgtttccagaactgtcttcagtgaagacttggttgtctgataaaaatgagtaaatccattgttgttatcgaatatctgcatcatgatatcatctcccttaattgggtacactcggatatcatagtgaaacccattaaagacacaagaaccactacagaatgctctaaagtcatccactgagatgtactcttcatgacctgtgatttttatacaaacacctttacttggtctcttaggattgatatcttccatcacagacatattctgtccaccaagagataccatagtgaccactttacggttcttctgtttaaagtacatcttaactttctgcaaagtgtcttcatagaacggataagacctttctacaaagattccttcaagtggttctttaccattttcaacttctctgttatgccgtactgcaaagatgatttgttcgaaccagtcaaaattttcttcggagagtgctccacgaatatcattccagtcaaggactaggtagttaccttcaacttcttttaagttatctttttccatagctatcacaccattatcgtaaaacttggtaagctggaactgcaaacttgttgccgttgttcttaatgaggtcttcttctgttactaagaatgtaatcccacataagtgtgtgtattggctatcatactcaaatattttaagtaagtatttaccatcgtgataaacagattctactacaccttttgcaacaatctttccagtcttgaaatctttaagagggtatacattaccaactttagggactgttttcatctcaggttcttttagcttctcaccagtttctacatcacctagtaagtgagaactctcaaacgctacgtactgcatataaacttctgagcattcccagataaaacaatgtacaagaaccttagcagcatgtcttgagcaattcaacttatcacaaatttctttatacatttcgtctttagttgagttgtcaagcattgcttttcgaactgtttctttaactttcataagctctccgaataaccctattaagcatctctaaagtcagctttccagattctaaatgtggcataacaagctttaaagctttttcaacatcatgcacaacatctattataccttctgcataggcttctacaaggatatcttttacattttgtgatttacctttttgtggtatcactagacgcatatcaaactcatttgcttgaggatggttcttaccacgccagagaccgtccttatcaaagcttataaagttatcctcattaaaattaataccacaaacaacaaacttatctagcactatgcagttgagagggtaatcatcatttgcatcattcattccgagaaacttaacagtagagatatatctctgtgtctttgcatctacaacgtcaagctctttacctataagttcttccatttcgctaccttctaagtttctacaaaggggctatcaagtaacccctaagttattactcagacttttcagtcttcttatcggatttcttactagtcttcttctcagctttctgttcaggctccttctcagaagttgccttaataaccataccaagaagctctgataagtcactcttcagcaaagtaacaggctgctcgttgtagaagtttttgtcaagataaactttgaactcttctatagaaggaaatccaaagattggtacaggtgtcttaatcattacttagtctctccataggcatctttcaagattgccttgttaatcatttcagcgattgcaaaacgaacacatacagctataattgtaggttgcattctttacttacctcttcaagtttaatctccgagtccttaagtcgtttcttatgaactctgaacctcattagtgagatgataataccagctaaaggaacagcatacaagtaccagatatcatgcaactttgcagtaatctgtgtaattgtcaaatcttgagctatgtagccgattgctgatactaccagtaacattgctaagaagaacactagtatcatagcaatatttagacaacctctggcatggtattcatgcttaatacacttattcttttcgtcaacaactctgttgtagtcatttgtaaagtctctgtagaaagctttcaggtattcttgagtatagccttcaaagcaacctgtaccgtaccaataatcaccaccaaaatgtgctacgataccggtatctccattcggtttggttacttttaaagaagtatgatggcgagtatcctgataatctatcttgtatctttcttcgtaaatcatttcccaacccctctcaatcgtttgttccactcaaggtcaacaagtctttgcaggacttttcctctaggtgttacaccttttaaacctgcatcatagcaacggtaaaagtcaccttcagcatgtttaccgtagcatttcctgatattctggctcctacgatactgttctaacagggacagcttgtagtagtcttcaactgtagttagttttttcattcttttaccatgtctcttgtctagaaactaaaaagggaactacctctcgatagctcccatcataatcagtgttgtatactcggtcaagagtattttttaggcagtaatgcactgcgcttgttactctcttcactcaacagtgcaatgaagtcatcacttttacctttccacgggctgaatgaagggatatgctcacgaatggcttcaatcaccgttttcagtgctgtatttttcatccaccaatcagaatctgctgatgctaccacgtagtatccaccgtcatcagttaaaattggctcagaaatacatggtgaaatcaaagtggtgatgattgaaccattgttcatgtagtatgttcgtttcataaccttttcaagaagcttgtgaaggtcaccaaacaatgttacaagttctttgtggtcaatatctttttcgaggcttgctcgatacttcaatagtgcagcatcaacctctctgtcattgaacttgaaatattgaacttcttcaacaaggcaaacactgatgttgttaacgttcatagtcaacttacaaacttttacaggagagttgatattcggttgaaaaagtgcaatacacccttcaatatttccaaagtgttgtaccagtgttacttgtggagtaatattctgttgctcttcggacattacagtttcctcattaaatactttttaagttgtgtgttaggtttctcaaaaacttctatagaagatatcttgacagattcaccacgcatacctgtatgtttgaatatatagtactctaacatccctatatactttgctggtaagtcatgtttgacatacaccgttacagaatcttcaaattcaacaacctttgtaccatctttgtagttaaactctttaggatggttgtagttgtcgatgtcgtacattaaaaagagtcttttccgttgcatatcaagcttattggttaaagactctttgatgtctgagaagtttttatacactatgacgtggagcttactcatcgttaaactctctgacgaagaagtagttgactttattattacctaccataaggtcaaagcaggtattctcaaaaggtttgttgtaggcatcatatgaagtatacgtatcagctacttgtttagtgttgagctttttacttgatggatttaagaggccaccatacagtttcttgatagcctcttctacaacagaccagatgatttcgtcagtaatttcttcgtacaggtcaagttcacgctctagtgagaagtcacaaatagggaaaataacctgtactttactcattagcgaatgacctgtgttacctgaatagcttcagttactgacaaatcaccaaccgtttcttctttgacgaaggtgaaggtaagttcaacaggctcttgttcttcctgctcaaccggaataccgttaagctcatcaaagattgattgagttgtccagtcttctccaccatctgggtagtggattgcgtaaagtggaaactctaaattataccaagcaaaaacagggcaaccatctgcatcatctcgacatctgtggagatatgtgtttgtaccttcaaaatgcaaatggagattaccattcttctcaaatagaagagcatcttgcaggtctagttcctcattttcgctgtaacgactgacatcaaccttaacatggatatgactgttattattcataaaaacctctctctgcttgttcgatttttgctcttaaaatttcgcaatgttgtaaatggtagttagcttcttgttcatgtgttgctaactgcctttcaagaacagttttataataacctgcaagttgctcttttgtcaacgggtgttctgaaataatatcaagtccactttcgccaagagggttgaattgtccatgctcattgacattgtaagtctcaaacttgaacaggccattgttcacagactcaataggtgacagttcaacaagctctacagtaaaccgtgtatacaccttgtcgcctcttgaaaccacattgtttccgacaatgcgtacaagcgaaccattacgagtgtacttaaaagtcccaaagtcactagcccaaagcttcatagttttctccttagaaaataaaaaaggctcccgaaggagcctatgaagatattactttggatatacactgtcaagataaatgtcagcttccattctacgtctgtttttcagaccgtttgaggtgaccttcttacctttgactgtaaccttgttccaccactgcatagcttctgcgcaacctaccttattaccagcattgtggcgcttgataaatgtagaatcctgcatagctgtgatgccgatgttgtatgtttcacttacaagtgcatcaaactcgttctgagaagttggaaccttgatagctttgttcactgctgtaacaaacttttcaacatctgcgagaagataatgttcagcttgttcagcagtaattatcatacccatcttaacaggttttccgtcaatacggattgtaccatacccgattgtagggattccggcagagtcttcgtaagcctctaacttcagaccttcaaagaacttaatagcttctaaaccttttcttgagagttgcattatgcctcccctgctgggttaactgtaactgttgccgcattagatgttacagagccacctgcgccagtcactacacaggtgtagcttcctgcatcagcagcggttgcaccttctttggtgtaagttgcagcagttgcgtctgggatgacttcctcacctttcttccactgataacctgtcgcacctgttgccacaacattcagtgttaaggtctcaccttcagtgatttcttgattggttggttgctgagtgattaccggaagtgcattcacagtaactgttgcagggctagaagtaacagaaccacctgcacctgttacaacgcaagtgtatgaacctgcatctgctggcagagcaccagacttgctataggtagcatttgtcgctgaaggaatgtcagagccatctttcttccactggtaacccgttgcacccgttgcagtcacttccaagctgatgtttccaccctcattgatggtctggctagaaggttgttgtgtaatcacaggtagtgcgttcacagtcactgttgctgcatctgaggtaacacttgttccaccctctccagatacaacacaagtgtatgaaccagcgtcagaaggtgctactgactgttttgtgtaagttgcagaattggcactagggatgtcctcaccatcctttttccattgatatccagtggcattagttgcaataacgcttagggtaagtgtacccccttcatttactgtttgattggttggttgctgagtgattgatggtggcttgatagcatccttcaacttagcattcaacattgagaaaggtttaactcttgccagccattcacaataaactgtatcaacgtctttaccattgataattgcatattgtaagtccatgaagaagtcagacgttctcatttgagcaccaacgctgtaaagcaactcatcactaaatggaactttgtagtctggtttgtagtcaaacttcttaacttctgcaatatcagcttcaggccaatacgaactataggtaagtggtaaaatagcctcttgatatgttctaaaatcatatctcttaccagcctttacgtttgcaacgaagcccttcacaaactctttgaagtctgggtaagtctttgctttaatcatttctttttagcctctaaatgtgcgtttagtctaaaataacctttgtgatgcggagatacatcaccaacaacaatacctttaaccttatagcctttaccaattacatactggatatccataaggaatcttccaagtccaacaatatggaacattggatataataggttctcagaatctggaatattgatttcaggtttgtaggtacgctgttcgattgttggtgtaatatcttcttcaggccatttgctgagtctccatgtcaaaggtgttgggataacatcattaaggttgtacctttcaccattttgcacggaattgatataggattgtaggaagcaataaaagtcttttgcactcttagctttcattaagtatccttataaatagttaaaggggcattagcccctattcacacttaagctttggtcttaagtaggttcttaagttttttaagattcatactctcatcaaacttaaaaccaaatccattgacataatcaatgaactcggatttcttactgagtgacaatgcgtaactcatatcaaagttcttacttgtttctgcgtctggactagagttcacatcaaatgaaatttccgtaggctcttgcttactttttctcatattatcaaccaacaaacatgtatagtttgctggatagaaatttacactaccatcaacgtagctgtacttattattatggataaggttggaaaataccttaaggaatgtttctgagtcgtggcaaacaagtttgaattggctgctctctccaagcgcaactaatgagtacggactttcactatcaaagtcataattttgattcgatgccgttactgttacacgcatcaagttattagcaatagtcttctgtttaaaagaattttgaacatagtgaagacctctatcacactgattgactagctctttaagcaggtcatttgcatatggtgaattaattgatacagagccatcactattgtaattaaaacttactgttaacatttttcagttctcctgcggtttataattttgctgcaatagagaaacgaagtaaactcactggaagaaaccattaagtgttgttcactagattgagccattgccctgaaatacattccagtcaaagcatcatagtgactattctttccaattgaggttatatagccatgactctttgcagtttgatataaatctataatatctgcgatttctaattgggaactacacatagataatcctcttgtcttctgtaattttgaaagaacaggtacagaccaatttcagaggatgaatagtagattaactctaccctttttgattccttacggtgattggtattcttacctttcttcggtttatttgattttctcattaagtctcctttgtataacaaggcagacctacagctttaagtaagatggtacagtaatccatacaacaagtcaagaactattgcaagttaaaaaagttgttgacaaagtacttgacaaggtgtaggcttataaatacttagaagataacttaaaaggttcctctaaaaaggctatttaaacagatatctttctggatatctatcttttatcttaaaagccttttaagaggtcttataagaggcataccaatgaaaaacagaacaaacaaaggccagtttaaaaaaggccagtctggaaacccatctggaagaccaaaaggctctcgtaacaaaagctcacttgtaaaagctcaactgaccattgataattctgctgagtttgctgcaaagttgtttgaggcggttgttacaagggatgctgctaagcttgcagagttcggtttgacgactgacgatgtaaacctgaagtcgatgatggaggctggtaaaaccatcatgactcactcagcaggtgagatgaaagcgattgcagcagacactaagaagacccctgataatggtggtcagtctcagacagataacaaaccaacgttctctgctgtagcgactctcaaaaaataattttaaaaggtgttgacagactctacaaagttgctctaaagtctgtcacatcaacaaacaaatgagagaagagagtaaaatatgagcgaattatttaaacatgcgcaccttcatgcaggtcgaactgaaaatggtgctgtaaaccatacttcatcaatgtctgctcttgtagacttttacaaagctgctggttcaagccgtagcaacgtagaaatcttaccagacctgttctacaaagctttgcgtgaggatgttgatgttgcatttcgtattttgcttcatatgcgagatgtacgagaaggtatgggtgagcgtaaagccttcagaactgttttacttcaagcgattgaagacaaagttttagagcctacgcaggttcttcgcattatggataagattgcagaacttggtcgttttgatgacttcaaaatcttcgtaggtactcgtttcgagacagatgccttcaaacatctagaagcagcattactagaccctgcaacagcaggtttggcggctaagtggttaccacgagtcaaaccacgtcataagcagtttgtaaaacgtttctgcaagtttgccaacttgagtgagaaagagtaccgcacactgttgtctgcactatctgatacagttgagcaaaaaatctctgctaatgagtttggtaagattgactacagtaagattccttcacttgctgctgcacgttaccaaaaactgtttaaccgcaaagatggagaacgctacaaagcttacatcgagtccttatcaaagggtgagactaagattaatgctggtgctgtttacccatacgatgtaattaaatctgttaagcatggtaatgcagatgttgctaatgagcagtggaaagcactaccaaactggatggcagagggtgaaaacatcttgtgtatgtctgatgtttcaagctcaatgtcttgggtgaattttggttcaattactgctcttgatattggtgtttcacttgcattgtatgtagcagaacgtaatacaggttgctttaagaatgagttgatggtttattcaacaaaccctcacttcatcgaactgagtggtgatttacgaaaccgtcatcgtcaggtgatgcgacacgttgaatatggctcaactaacttacaagcagcttttgaccgtattcttgaaacaggtaaaagaaacaacttgactcagaaagatatgccaagtaagcttatcatcttctccgatatggagttcaatcaggttgatggagctaacggtcgtacaaactttgaagcaattcgtagtaagtacaaaaaagctggatacgaaatgcctcaactggtattctggtacttagcaaaccgtaatggtacttgcgaagtatctgttaaggataacggtgtagcaatggtatcagggttctctccagccactttaaaagctctgcttggtggtgagaagtttgacccaatcagtgtaatgctcaaagcagtaatgattgaccgttatatctggtaaaaagttttaaaaagggtattgacaatgtgtttaataccctttaatatgttctacatagaaacgaaatgagagcttttctaagatactgaaaaatattttaaaaaagttcttgacaatcactaaaaaataatgttaaagtggttacatagagtttgaaaagtttatctccgtttagctcagtttggtttagcagcacttgctttgggagcaaggggtcgagggttcaaatccttcaacggagaccaaattaatgttccagtagacaaaatggtaaagtcaccactctttcaaagtggatatttgagggttcaaatcccttctggaacgccagttttgacagaagaccaattacagcaaacttaatctactcatctgaaagttaatcggacaaagaagatatttggtctggtcattaagaattgcgggtatagagaaagggcgtctcacatgtctcattagcatggtatcggcaggttcgactcctgcacccgcctccaaatttacagaagaccgtttacagcaatatttattaaatttttagcggaaaaaattgaaatatacggtctggtaatactaaacatggttaggaagcacataaggtatgtgcggtcgcctgttaagcgaatggcacagggttcgaatccctgactaaccgccaaattaaatgtgtcgttatcccgtagatggtagcggtggggactgtaaatcccttgtcattgagactcggtaggttcgactcctacacggcacaccaataaaggctatgtagtttaactggagaaaatactcccctgtcacgggagatgatgtgagttcaagtctcatcatagccgccaattttgagagggctatttagcccctcccttaaagggttcttacgagtatcctttaaaggagcagaagaccaaatacagcaagaacgtatgaaaatttcaagccaatttaattttgaaaaatttaaaacttggtctggctcaacaaatttacagaagaccgtttacagcaaaacttaaacaatctatttctcggtaaagaaaaggcgaaggttcgattccttcactcggcagatgtcgagttggtgtaatggtagcacttaagatgataaacaacggtctggtaattatctttgtagataagttattaagcttacctgtgagtatgcgaccacaaagggtgaaagggtaaattctagatttaaacccaacaaggcacatcgctacagaccttaagcaagtctgggtagcttatctacaaagataatttaatggaagtgtagcagaatggtgatgcggcagacttttaatctgacaggcgatgggttcgaatccctccacttctaccaaaatggttcagtcgcagataaggtaatgcaagggtctcataagccctatgaatgtgggttcgattcccatctgaacctccaagctggtatagttaagaaggttataacactcccctgataagggaacatcggtggttcgattccacctaccagtaccaatttcaataaagttgttgacattgagatgtgaccactttatagtaaccttagttttcgttgcgtagcgtctattttgcaaatttaaaataaatgcaaacgacaatgtttttctggcagtagcttgataggctaaacaccagtgaggtcttccaatccctcatcaaagaatttggcgtactcgcccacggtatgattaataaggtgggcatctttaagggctttctaagagagtctttaaagataattacggggcgtatctcagcggtcttctaaaccgccgttaaccgagtaagtggagtatgcgggttcgagtcctgccgcctcgaccaattttggagaaatcatgaaaacttgtattaggtgcaaacttagcaaggatgaaaatgatttctacatgaaagatggtaggagaactcattcatactgtaaaaagtgtgttaatgagcaaaccatagaaagacaaagagcacttaaactcttagctattgagtacaaaggtggggtttgtcatgattgtggtaagaagtatcatccagcagtgtatgacttccatcatttgaatccttcagataaagattttaacattggtcataggaaaagccttaagttctatcaagaactaaaagatgaacttgacaaatgtgttttgctatgttcaaattgccatagggtaagacatgcaaagtattagttagcagattgcttagacgaccttatcgggtctccgtgtaaggaggtggtctgtatctcatgttttccagaacatgtaaataatctgagaaggggctttacagtgttgagataatacggtaagcttcgaattatagtatgggacgatgttaagactctaaggcatgagcaacggcctccaaaaccgtttcaaaggggttcaactcctccgtcccatgccaaagtcttattaggggtaggtagcggctaatggcagccaaacagtcttgaaaactgttgccactgtagagatacggtgagggttcgactcctttacttaccgcctaataagatttaaagccaagcttcattcggatgttgctttggtatccctcgtgtattgtcgtacacgcacagtaaagcacctagtaggtgtcacggagaagagataatatcaagctctccaaaggttctagtcaccggattaaacaagactatgcaaagacctttttaggtctttttagagggcttctaaggttattacagcttgttgcggaaccttgttgcttaggttcttagaagttctctaaaaaggtttaatgggagattgacatatggcacgtagcagtttgactaaagatattcttgaacctttagtaaagggttcagtatcattcagagaagtgcttataaagcttgggagaaaaccagcaggtggttctcagtcacatctaaagcgtgttatagagaagtttgaaatagacacttctcatttcctcggacaaaaggctggtaagattaaaactgtaccaaaaagaaagcctgaagaaatcttaattttacgtgaatctggtgaaagagcaaggtcttcacaactaagaagagctttaatagcatcgggtatcgaatacaaatgctctaaatgcggtcagttaccggagtggttgggcaaccctctaactcttgatgttgaccacattaatgagaactggttagatgatagaaaagagaatcttcggttcttatgtccaaattgccacagtcaattctcaagacatttgatttaatgcacctatagcccaattggtagaggcagcagacttagaatctgctcagtgtgagttcgaatctctctaggtgtaccaaattaatgcaggtgtagcaaaatggttatgcggctgactcttaatcagtaagacgatgggttcaattccctccacctgtaccaaacattggggatgtagtttacatggttaaaacataagttttgcaaacttaagtacagggttcaattccctgcttctccaccaattagtgcatccatagtttaaacgggaaaattacagtcttccaaactgaggttgagggttcgattccctctggatgctccaaattaatgctcctatcgtataattggctattacggttgccttgtaagcaacttatcagggttcgaatccttgtgggagcaccaattcagaggtcaagtgaaagaccgctttgagtcaactgaagaccgtaacaaattccacggagttgagttagcggcacaactccagacctctttcatactcgcttagtttatatggtaaaacatcacccttacaagatgaagaaaaaggttcaagtcctttagtgagcaccatgttccagtatcccaattggcagaggatgcaagctcaaaccttgtactagtgacggttcgaatccgtcttggaacaccaattttgcaggattagttcaaatggacagagtaacagtctacgaagctgttaataggggttcgaatcccttatcctgcgccaatttaaagaggctatttagatgagatatttgaagtatgcttcatggattttcttagctttgttagagccatttgcagcaatcttagcagttatcttagcaccttttgtagttccattctacagtgagaagaaaggacacttacctttcgggttcagatggatggagacatatgacaacccaattgatggtgatgaaggtcacgttaaaagatgggctaatattagatggattggtaaactaggcgtctacatgcaaagagtcggatggctctggagaaacaaagcttataacttctcttaccatgtattaggaagagatgtaaaagatgttactaagtggaaaggtaatatcaacgtaagttctgaccccgaagataatcagacaggttatctcctaatgtggaacagtaatgcttggggattattcgcttttatcccatcaattaaaatctttggtaaacaattttactggagaatttatattggatggaaactaaaaagtgttgtcccagaagaaagagcattctcaagggaaagagttatgttggcattctttattcatccactgagaaagtaaagatttaaaggggattagtttacaaggttaaaacctcggtctttgaaatcgaagaagttggttcaattccaacatcccccgccaatgctccattactccaattggcagagaggccagacttaaaatctgtgttatgtatcggttcgaatccgatatggagtaccaaatttagcggtatagcataactggcaatgcagcagcctctgaagctgtcctattaaggttcaaatccttatgccgctgccacttctaaggattcttgcgagagtccttaaatgtggccttatcataaatggtaatgacccatgctgtgaacatggtctatacgggttcaaatcccgtaggtcaccccaatttatagtccaagtagcttatatggttaaagcgcgtgtctgaaaaacatgagaagagggttcaaatcccactggactaccaatttcaaaggtgcttaatgaaagagatgacagaacaaggtaaggagatttttaatctcttaaaaaccggtaaagggttctctaacccactgattaccggtgcagcagttctcggtggaaccgtagctgcttctacatcacttgtaagctctattagttctgtaacagaccctacaatgaaggagaaacttgttgctgctggacttacaacagtccttctaaacagctttacaacaagccttacaagcactacagcaactactaaaactctgacagactacggtcaaaagtctattgatgagttttcatcacgtatgcaggtagcaaaggggtattccaatgttatgggtgcagcaggagaacaagttggttgtacaccattcagtggtatcatgggtgttgctacagagtatggtcaaaaagctattgacatgatgaacagtacactagatagtgttaatggtgtgttaagtgacttacaagatgctattgataagggtcttgatactgtttctgatttagctaaccaagctgtcagtaagattaatgaaggtatctcaaagattacagcttatgcagatgaagttgtgcagatgattgaagaagaagctgcccttattgcagagtaccttaaaacgaatatcaatgggttcttagcaggtatcttaccagactggtttgatgatgcttgtaaaactggtgtgattgacactattgcaacaccagaaatgaagaacgcattacagaaataatggaagattaaccctaaaaggtaagggagcagtttgctaaactgccagtagctgagaaatcggtgtaccagttcaagtctggtatcttcctccaatttgaatccgtgacagaaatggctatgtgcctgtctgcaaaacaggtttataagggttcgagtcccttcggattctccaagttattttactctctctcaattaaaataataataatgccctgctataagtattcttcctttcgctaccgaagagtatttttagacagggcttttttacagagttatactttataagaagacttatacagtatgtctctgacgtacattgtggtttctccttgacggtctctgtgccgtcttttttaaggagaaacaaaattaattatttggagaaaacataatgagcgagaccgtttataaagaactttatgaagctaataaaaagctagaatttatgcagaatactatcatggcaattgcagacagattgtctgtagcaacaggtattgatattaaagaagcatctatggatgcacttcttgatgctgttgatgcaaagttcgaagttaagaaagaagagactgctacagactctgaataattctatttgcggaggtgctta

SEQ ID NO: 6 - DNA, 163097 bp, Escherichia coli phage ECML-123-2
  source 1..163097: mol_type = genomic DNA
ttaggccgcaagggccttcatagttttagcgatttgagaaacttcatcatcacttaaagagttgcgatatccgatgaagtcggaaacaatacggaatttcttggtaaactcagcaaccattttatcactgttttttgaagcattatttgataatacatcaaaaagattagttactgtccagatgtcatgaccgatggtatcttttccaccattaaaatatacaccgcgcaatgaactaactatattagcgagtcgtgtatattcttcagaaacttcatctgtactgaagtacttcatcataaaatctagttcaggatacttgataattttatcaatatatcgttgagctgaacttgaataacctacgtacttatcataatctacatcatcaaaagcatctacatataaatcacgcagagtttcaaaaatacattggcactgaccgagttcttttacctttttctgcaaaagcggacgaataacataaaactcattaatgccaataagattagccatacgaatcaaaatattcatagatggatgacaaagagatgtagtaccatccatagagaaaatatcagaacgatgcatatacgctacatacccagtaatttcatctgcttctgatgtgagcgtaaataattcctctttttcccagcgcccgtctttaatttcaaacttaaatgctgtagcagctttaggacgaggagctttacttttaactacctttggaatatagcttttaactaaagcttcaatttctgacaaataatgaatgttaacttcatcactttcaaacatcgccataatatcaggaagcaaatcaatctgcgattctacttctggattaataaacagaaggcgttcgttgtgatgaatattcaaagtgttattaaattcactatcatctaacgcatgtgctaatccacggacaatattaacacgatttttaatattatcaataacgatattaatttttgttgcattaataccaaacagacgataacttgatgcaacggctgaagtttcatgactttgcttaatgcgcttcagtcgagggtcaagatttacttcatacacaactcctgcattgcataacttactatcaggttcaaacatgctttgcatcttcttatatgacagatttttagtcgtaaatttgactgaattactaatcatataatctcgagcagaataccccatcttcatcaattcacgatatgtatgacggggagatgtggattctttaaatcgttttacatcttcattaaatgctttctcactgagttctttaactcgttcaataatatttttacgagtacgatcatccagtgaaagagcctcgcgagatggagcaatatcaagtgaacccattggaaacttaatgtaattcacttcattgcgaatgcttagccagttacggtctctaataacaccatcgataggataaacaataccgccatagatagcatataatccaccacgatcaggccagtatctttctggatttacaccgtaatagtcatcaaaatccggaaaataatcaatttcgcggtcaagaccattaatgatagccaaatctttgaatggtcgcatgatataagaaacttcataagcaaagtttctaaagtctttttcttcaactggaactacgatttcaataccagttttatcatctggacccatttcttttacgaatgtaggtttaatctgtgggccatcaccatccatgtaagctacataaccacgaatttcacctttatgatacgaagtaatactaaacgtatcagtataactaaacggagatttagaacctaaaccaaatccgccaataaagtcattagattcagccttagatgaactgaagtatgaattatataacccaggagaattatcatcaccctgaatatcaaaatcactcatacccggaccaaaatctcgacaaacaaatcgcggatctaatcgtcctggaacttgtatgataaatttttcaggatttccattaagtgcatgggcatcaatcatattagtaattaattcacggactactgcacgaatcttgtttgtatacaaatcagatgacagaattttaaatactttaggagatgctgtgatgctaaatgcttttgatttagaaccattgccaagaattgtttctttttcagtggtgataatcataatttcctcattaattcatattacgtttaataacttcggcaacttctagtagttcatctttagttgcggtatcggattgaattttatctctaatatccttaaagcggtttttaaattcttcggcttctcccatatcgaaaaagcgttgaatgattctatattctcgatgaactgctttatcaaaaagttctaaatttactttatatgatttcatttcaatatcctcatttgcccaattaattataccacatccttgtggtaaagtaaactactggctcatccattctttacgaaggtcagcattatctcccatgagcatttcaaaaagctctttccagttctcaggaagtttaacaacatcatatactgggttttgaatcatctcacgatattcagatttttccaaagagccaagtcctttaatataacggatgctatgtttaggtagagcatctttggcactctcatattcagcgactgtataaaaccattcttgttttttaccgacctgagcgatgattacaggagttttgacaaagcgaattcgtccttgctcaaacaattctggccaattactaaaaaacccgagcagagaaggataaatgcttcctagaccatcatggtcagcatcggtcataatagcaatattatgataattcaagttttcagctttttcaccaagaactaatccagtgattgcgcaaatatcaaacagttctttgtttttaagcatgtcagcatatgacataccccaactgttgagaactttaccacgtaatggataaccaccgtgaagttctttatcacgaacatcaataagatatccgatagccgaatcaccctcagtcaagaaaagagtagtgtcagcatctttaccacaaagattcgctttgatatgtttatgaaccttagctttagaagcctttttagctgctttagtttctgctgctttttctgccgccaatttacgagccaaagcagcttcaataatcggcattagaattgcttcattatttagaatagcacgtgaaatctttttagcatcaagctgaatatgactacggatttcaccaaatggagaagtcaaacgctctttagtttgagaatcaaatcgcatgtttttcatatcacgaacaaacataacgatagtcaaacattctttaacacgtgctttagttacatcaattttgaacttacgtttgatttgtggaataaggtcttcacaaatatcatccataacacagtcaatgtgatggccaccattcttagtatgaatgttattaacgtatgttaattgacgaaaaccatccggtgaacgaccaaccgcaatagaacaattttcttgttcttgaacaatagcatgctcatcatattggcgtgcatatttcttaaaattgccctgaacctttttaccattaaaggtaaattgaatatcaggataaactactgcgagtgtctggagacggtccagtgtaatgtcaagataaacctgagacagctcattagtttcaaatgacataaaatcaggaatgaaagtaacacgagttcctttccattttccaggaatatcttcccatgatttattttccatgccatttgaacaacgaactacaatattattttgaccatcaccagtttcaccgacaaacatcacagaaaaaatgtttgtcaaactagaaccaacaccattcataccgccagtgacacgttctttatcatcaccaaagttaccacctgcttttggaatagtccatgcagcaactggaccaggaatttcttcaccggtaggtgttttaaccatcgcttgtggaataccgcgaccgttatcttcaactgttacctgattatttttaatggtaacattaattttatttgcgaatttaaacttagtacgaataccttcatctactgagttatcgataatttcatcaataagcttaacaagaccaggtacatactgaacactttcccatttaccaaacagaaagcgctcatgcatttcattagcagaagagccaatatacatgccgctacgctttttgatatgttcaatatcgctcagaattttaatttcattcttaatcatcacttatcctcgtttggtttcgggaatattatactccggtaatcataaagctaaaggcccgaaggccttttatttaaaacgaatagttgaatccttaaagaacagcccagaacatactgttccttctactttctgcccagtaggtccaatagcacgaaatccagtatgttggaaatcattttcagaacaaccgaaccagttatatccagtgatttcaatattagtaaaaccgcttgaagacaaaactttggttgcattatcagcatcagtacatcctactaaagacactgctaatactaatgctgcgatagaacgattaatatatttcataattttcacttaaatttaatggcttgaagaagactaataactctcaagcggcttctttcatctttaactgtaaaagaaagagggtcaccagatttcatagtgatagtgcattcaaaagcaaaaccttcgggaacttcttcgaagaagtcaaattcttcatcataaattagaacattactctgcatactgtgaagaatttttccgtcatttccagatgctgtactaatcattgtgtaacgttattacctttcatatcttcaacgataaattcgcttgtagatattacaacattaatagaaccattcctataaatagcagaaaatagatatttcttttcttcaccttcgcgaatgcgatatttcttaccgattttaaacataattaccctttaagtaagtcgtaaaatccgccattcacatgcttaggggcagagactaaccgaatagcaatccgatgacaatcaggacatacatcagtatctctttcagaaattttcttgattttttcgtattcttttgcgcagtcttttgattgacatttataatcataaagcggcataattattccttaaagtgagctttcaacatctgatacaaggaccatgcctgttcatcattttcaatagtaactttcattacagggaatttagattgatcagttatcggtgcagattcttcctgctcttcagctgcctggtatggattttcaacttcattaaagaattcagcttcattcgatgaaagccaaataaaatcttcatccaaaatatctttaccagaagatagtactaaatttccagcaaatgacataattttaataggacgcccaagagcatccacatctaaaattttaaaaggatgcatacctaaacggcgtgcatagattccgttatcagtatggtctttaataaaattttcttgagcttgtttatttttaaattgataccatttattaacttcaaatttaatagccattaataaatttccttccagtaagttgtgccatcttcagtgatttcacgaaatacaccgtaaattggttgtttatccccaaccttttcatacacataaaccgaagtcaagtgagtaaacttagcagtgtgttccttttgaactactaccaaatctggatcgaataatacatcttcaaattcatcattagtgcaattctgaacaattttacgtttcatcataatttcctcattaattgaacattggagcgatgcgtttcagaagagtatcagcgnnnnnnnnnntgataaaaatctttatgtgtaaagaatggactgatataagcagtgttttctcctgggtcaacaggtctaatttgcttattatcacctattccaattatagtacaccacggcgggatagttgaaagcagaattttaaatagctttctatcatacattgacacttcatcgcagattaatactctgcatttagctaaatctggtacttccttctgctcaaagaggacattttcttcatatgttaccgggttaattttgagaatactgtgaatagtactcgcttctttccctgatagttttgaaagaatctttttagctgcatgagtaggagctgctaaaataatgccagtttcgcccgtagatattaaggcttcaatgatgaacttagtaagagtagtcttaccagtaccagcaggtccattaatagttacatgatgtttcttttctttaatagccctcataacgatgttaaaggcatttttctggccttcagtcaaatcatcaaatgtcatcgtaaattccctgcaattggtatactaacaatacgcccagtatctaaaattcgccgatataatctttgtgtgtctacatcaggcttaacatgtttaacttctattttattaaaccaaaacttgcgtggagtctcaactaatctcggaattcccatacctaaagctagtcgatactgctctttaagagtggtaaatactttatcagcaatctccctttcaaaaaatacagcaggacgatgttcatcaagtggaactggcgccgtaaatccgtctttgtctcggtaaactatcgcatatacataaaccatattatcctcggataagtttaaaaattgaacaatttaacgggtatcctcttttcagtttaagtttatcaataaaagacaagttttgataccgctctacaccttgaataattttatcacacatatcatattgcatttctgcttctgacaactttttcacagttttccaatcagagcctttaagaagaacgttcaatttaacaacttcagcgccttctgctatacgagaaccatcaatacgagctttgagtgctacaatcgttagcttaacgtcagaggtttgttttgatttagaaagccgagaaatgtgttcaattcggttttcacgttttttctgtatagctttaatttgattataagtctttttgattttagcccatttcttttcatctaaatttagtttatgaacttttttcgcagatgaacgaccaattcgcaaagcaaataaatcacgcttttcaatcagctcttctaaagtataatcagaacgaaatgtattatactttttctttactgcaataacattccctttaatgtatccaacgttattatcaaaacgttctaatgataatttctctccttcaatacgattatcaaaaggttctcccgagtaagcacaaactttttgatctaaaatgttcttaatgtaattgaagtctaagttaaaatctttagaacgtcttttagcagatgcctgagtatgctctagacgacgtttaattttacgaatttgattattagacagcttcatatttttctcacatcttacggacggttaactacttatactataacatttttaccttaacttgtaaacaactttatgtaaaaatgctttaaaactttcatggtataatgaatctaagtccttccattatagattaaatccttcaaaatcaagagtatagatagtgtatgttgaatactttttgtactcatatctatctgcaattctaaatacacttccagctggtatcattacttcttgttcatctgaaactaattccatattacgataacgatggctatctggaaacttaaagtttggattgtattctttacagcgtagagcttttatagcatactcctggaaattgaataccataggagctttgaattcaaaaataacttgtgtgttatactctaaaccagaagcaaaatgcagagctatatttttatcatatgaagctgatactactttatcaaatgtaataatatcaattccttgatttaatacttgcttagtctcagctggaacacctctccaaagaggtttatcgtttggaaccaaacgagatttgattatttcatttaaccaagtatggtcatctggtttgttggtaatacaatgaattaaaagttcaatttcagataaattaaatccttcagaaagtaattcttcacgaatagaagcacgcaccgatgcatccattgattttattttaaaatcttttagttgcattactgagtatttcattcaactacctcaatatcataaactttaaatgttccaaatgaatcgtgtaatttttcttttgaaatagaagttattctatactttccaattggaatcatccattcttgttcacgcacaatcatcattaagttatcagtacgctctgaatctaatccatcagtatcttcatacgtgtacttaaactcagtattaggagaagaaagtataatatcgctgatatggtcagaataattaaaagctttatcagtttttaagcgaaatattatttcagtgaaatacacataagaaaaaccacatgctatgtgcaaactagtagtaaatgaatctaccctgttcgttgaaaacacttctccgacttgtaaatctttaatgagttcttttgtcgattttgatataccacgatatagctgataaggtgatttagttaaatgctttttaatgattttattcaactgcctatgaagagcttcattctttttagcttccatacattgccaaagaattgactgctcaaagtcagtaaatttttcacagacttttttatacatatcatattgaaaatcaacgctttcagcttttatagataactgttcaacatctgcaagattaataatcatgatagcctccgtatacttcagaagctatcatatcatcgttagaaaggaaagtaaacaactttttgaattattttgcccagggagcccaaggcggagggtcaagatggtatgaagctagttcttctagaagagcatctggggcttcaattccataattctgtaatactatacggtactctttcttataatcactagaatcattctggttattcgtagaatgattatcttctaacatctcaaataaatccatattaattcctagcgataaaaaccaaattgacgattagcttcaataatctttctttcttcttcggacattctccaacgtagtccaacatcaaaatgagcccagaccatcttaacaaatgcatttatatctttaatatcttcaataatgaatgttttacttttagaaggttgactcactaatttaactttatcatcttcaaacaggtcaaaaagaccatattcatgagctcttttatagcctttaatagttaaagcttcagaagaagaaaacggtgaatctgtattctgcaaaatatcttcagtatgctttataattagaataacattttctggatattttctttcttttatatctttaattaaaagatccggattttctgctaaaggaataattaatgagcattttttatcaagtgcatttactgatttaccttctttagacataaattctattgaataatgttttgctacttcaatcatgtgatttccttttgcctactaatggaccatcgggaattttgttttcctggatatatttctcattttcttccatcattttactgccaattttaagaagcaaatccagtgcttcatttgcttttgctttagcctcttctaacgttatatctttgttcatgatttatcaccatagatgtctctcatcaatttaagcgctgagcgttctaatttcttttctttctcagcactaatcattgatttcatccattcttccgattcgttctgcatttctttatttgcttgttcaacccaaccatcgtcaatatacattgagtttggtctattgaaccattcaagaatcttcttgggagctttcatttattttacctaaaacaatagtaggagcatcgtcaaatttatgaatttttagtaaatttggatttaacttattccataaagaggtaataaaatatgatagcgcactttcgtccgtaattataaatttatttcctttatctattttccaatcatatattgaatcatatgaatagaaggataacggtttattattataatatgcttcactaacatcaatatagttagatttagtaaatgcttgaattgccataaatggagaattttgtacagtttcaataattccgatctttttaagttttatttcaacatcttctggaattggcattgaaataaaatcttctactagatacatgttattgtcatatcttttatcaatcattactgctacggtaattggaacatccttgacaaacgccatactaatactattgatagacatttcaaacaaaattgcttccataattttcctcaatcacaagatgtagatgaacaactagaatcacaagaacttccacatgaatcacctgcccatacgtgaacaggaacatttgtatcatatgaatcagaactagactgtgttttctgtgcattagatgatgtagtaggtgttgaccagcgccaaggatttttataatattcttgggcttcttcataagtcatagtaactgcttctactgttccatctcccatataaacatactcaactacagttaaaggaaggtagtcatttgaaataggaactacaccttctccgggagttgtagagaaaaaatctgtaaagaaacttttaaaccaattaaagataaacattacaaaaagcctttcttgaattcgacttgcttctcaccataatcatatcgaatttctgcattaaattcgacagaaccatctgcgtacatcataaatgaatgcacaacaacttctgtagaccatggttgtagttcatatttcttcattacgtgtcgtgaaatgataatatctaaatcttcattcggtttaatccaacgatttaacatagcgctctcctctataagataattctattataccatactcattttggaaagtaaaccatttaaatgaaaaaaggactcccgaaggagtccttgaattattaaccaccagttactttccacaaatcttcgtttgcagcaatccattcagtacgctgattttcttcatatacagtagtatatgctgctttttctgaagggaacgtctggtaatgagcaccagaaattttgtgaacgtcagaataaagagggaaagctactgaaatttcctttccttcaattttcttatttccatctaatttctgctcaaatgttttgatattaacataaccgcgagtactagccatgtaattctccttttatttaaattacatgattatttataataaattctcgcggcttttaagacgagctgttaataacctcggtcttgacgagcgaaattttcagcatttttcagataataaagtttaaagatttcttctgctgtaagaccaagaccttgaaacatgttcagaacaaaatggagaatatcaatcatttcgaatttgatttctaactggtcctgtggagacaaatcagtaatcagagtttcacgacgttcaccatgctgcgacttccaaggcttccatacagcagatgcatctttttcaccattgctcataccaccaagagaagtcagaagttcgcggaattcatcatcaatataatctttctgattacgcagccaatcaacaacttcacctgcagtagccaaatcatcaggatgacggttatattcaggtttatctttagctaaacgaatctgcagagatttctgcatgtcaagcattacctgcagcgggtctttttcatcaccgagaatatcccaatattcattttgagctttatcagcgccttcgatcagttgactacattcgttaaagtaagccattatttttcctttcaattcattaataagttaaataattataccatttgaatatataagcaattaattaaaaatatatacttcatcagttccattcttttctttggaatgatatatgttaaagacgtattttttattaagatgcttaacagtgtattttttagaccattctttaagaagagtattttcctttccgtggtgctctaaaacattcgacagtccaaattttattcctctgtcatttaaagagtctaaaagatttaaaaggtctttttcttcgtcttctgaccaaaatttattataatcagcaactgttataagatatggagggtccacatatacaaaatcgccgtctaaaattttaacatctttaaaatgcaatgaactgaagattattttatcacaattttgtttaaagtgattaaagcgtttttcactatttttgtttatagttctttttccaaacggagtagtaaaatttcctttatcgtttatacgaatcatattactaaacccgtgaaaatgaagaacataaagtaaaagaggatctctagttttattataatcttcacgtaatttcaaaaactcttcttttgatgtttttgatagtttgtattgctttattacttttaaaacgtcatcccatgatacattaataagacgcttatacatttcaataattggttcttgaatatcattggccaatacaggaccattgacgttcaaagacactgataaacctccacaaaataaatccacgaatctgtcatattttggaaagtgaggcttaagttcaggtaataatgattgtttattacctatatacgcgatagctcctagcattatattctctcatttattgcagcaaaaatgaattatacaattcttcatcatatgtatttgatagtaatactaacacgttttgcgataaatattaatttaaaggaggacatatggtacaaaaattaatggcacttgttaatgccataaaaggtaataaaaaacgtatagcttttactatttctgctatgataggaattttactttggaattttgttttatcgccagttgctattgctcatggcgttagtattccagtagttactcttgatacattcgtagatttagcatttgctttggttgggttaatttaaatcttggcatatttagatagcctcattttagccattaacccctgggcaatattatttttcatatattccataatttgttcaggggttgcaccttcctttctaatcatatcattgacatcttttgatttccagggagatttatcccaaaacataaccctttctcctgcatcaactaatttagtcattcgcttaatagtgtcagggtgacgaggttcattatctaaaacccacactcgtctatctttaaatggaacaacttctaggtctaattgaccacctgtaatagctataccattttcaataaaaagtgaatctataggtccttctagaacatatacatcaccatctttaactcgttcaacaccgtaaatttttgttgcctcaggataagctttaatggtgatatatttttgaggagcatctttctttaatgcacgtccttgaaaagactcagcttttccgttagcattataaattggaataacaagacgaggctcaggtgtttcctttttatatgttcctggagctatactattaactaatttaggccattcagttgtaaaccaaagatatttccatttatcctttggaatacaacgagcttttacatattttataattggatggtcttccgccaatttatctaatctgatgcatgacggaagagatttaattattttcttctcaggttgtttaggaagttctttaggtttttctactggacgacttttacctttttcttttcttatttcaaagatatactcacgatataaatcaggttcaaactcctttaaatatattccgattggtgcatggtagttacagttataacaatgaatatttccttcattattatcgccataataccatccacgggctttattttgatcggtttttgaatctccacaaacgggacatctaaaccgtaatttaaaagttgaactattatttacttgtgcgaatttaggtaaatgagccaatgcacggtatgcaaactcattatcaatccaaggtattgatgacatttttactcttctttttctttagattcctcttttttctttttaggaatctgttcaggacctttatttactacagcacctgacgttgttccagtggagatattttcaggattaccacctgaatctccagctaccatatcttctttaataaattctttatatgttttcatattaacctctattcataaaagcattaaaaatttggtcatcaatagaaacatctactttagactgtttttctgatggtaattcatatccacatattacaattttgtgatcaatatcaaaatacacagaagcaatatgattaatgatgttttcagtaaagtctaaatcaacatcaatatctttttgaccacagcccaaaggataaataatgcgagtaattcgattatctttaacaaagattccaccgacatactctgtgctgcgtttaaagtctacacgccgacgaaatgaaaaatattcaggctctttatgagctcggctcatagggcacaacgaataactagaataagagatgtcaaatcctacgccttcaatatgaactaaattgtcatgattaaaccaattataatcatatgccaagtccattagattgtcatatgtgaaaggcaccggattaacatcattggtcacaagcatataattagcaactgctataatttcattatttttaacgaatacaaaccgtgattgatgtgaatgacctggacctgcgttttcacgattaatgatataacactgggcacctttatatttgtacgtgtctttacacttgtgcatttgataaagcattattcacctaccacttcagcgatgatatttttattattaaagtttttatcgcaatacagaacataattatactgcattacaccaccagacttaagctgtttttgcacttcagctttcatttcaggacgatcacgctcaacgatattcataatatccgcttcaatttgaatttcaacttcagtctgatctgcagtcatagaccattcgcacaaatctttgtcataacccgccatagcaggctgagcagcgcaagaagataaagcaaaaattgcagcaaagataaattttttcatgataatctcctcagtagtttatgtttatatagtatctcaatttccaataaaagtaaacagttattttaaaacttctgcataatcacatgttacaaactgtttctctaacttggcgattttacgaaagtatcttttgcattgacgaatctgtcgctttgtagggcgcacagcaaacttaataaattccactcgaccaaatggagggctttcttctgccggaatatctaatactaattcccacgtatctgcaataagtgctttgaattgagtatttttcctgacattatacggagtaggtttaaataaaacgatatgcatattatcctcggcaatccacttcacataccttcttgtcatcaatgaaagctttaactagtgctttattaacttcagcatattgagtagtagcccattgaacgtcatctttcatcattgtgatctctttagtaaacatgctttcattcttaaaccaccccataaaaactacctttaccaattccataacaatctcctcatttaaccaacaagactactataccatagtcttgtcagcttgtaaactaaaattttaattcatttgccaaagcatctaactgagctcgagtcgattcgtttctttgatagcgattctgctcagcttgtatctgttgtgaacctgctacctcactcacttcagttggagtagaatcttgttcaatttctacccatttctgatttcctttttgaacacccatcaaaaacttattccatttattcttatcaccatatcgtgatttgatttgcttaataagttgttgttcagcagctgctaactcctcggtttcaatgaccgcaagcataaaatcagctgttgctggaagaccggcagattctgcaatatcgctcatgttaacatcagaagaatcccaagcttgtttaccaacctgtgctgcagtccaaagaacagtttcggtttcaacagcaagagcacgtaattcctctgcaatggctttaacagttgtgtaactattttctgagtaaactctaatgcggcaagatttacaaatacccagatagtcgacaataatgattgttggaacaaaattcttcttgagctttaattcgtttaaaagcgatcgaaatgtattagcatctgctccaccagtaggatactgtttaactattaaacgaccgagagtagatttctcgcgccatttttccatttttcctttatactcagcgtaagaaatatgcccgtcatcaatgtcatcaagagaaacatcaagcatattagcatcaatacgtttagcacagacttcttctgccatttccatggagatataaagaacgttatgaccaagctgtaaataatccgctgctaatgaacaaagtcctaatgatttaccaacgttaacaccagccattaaaacgttcagtgttcctgtctcagctccgcctttagtaattttgtttagaattctgagtttaaatggaactttacgagctttattcatataagatagccagcgtgcttcgtagtcatccatccaatcatgaccaacgtagctatcaaatgaaattgataatgcttgacgcatgatatcaggaatagcacctacatctggcattttcttatttcgtttttccggaggaagctcagcattagtttgaatttcgattattttagacgtagcattaaacatcgccctttgctgaacatatttttctgtttcttttactaaccaactgtggtcttctggagaatcggctagttttgaaataagtgtttttacaccagaatattctgtttcagtaaatgaactattttctaatgcaacatttaacgcattaatagatggaacgctatgatactcattaacatgagatttaattaatttgaacgtatttttagctggaccactttcaaaatattctgaatccatatatggccaaacttttgaaaaataagcttgatcaaatatgagatgagaaagaataatttctaccacacttactccttaaaagaatttaaactttttctttgaccttttattaaatgcatcttgtagttgcattgtaatacatttttctacatgaggagctaactcagcttttctttcttggtcaagaacagcaaagtccattacgacttttccatcaacccaatctaattttgtcacatacacaatgtgtgtagaaccatcttctagtttaatgacaatctcctggataacattttccatggcagatttaattatcttaagagattcattaaaaagacgttcttttctttcttcttccccctccgaagagggggattcatcgataatttctagatctaagtctaaatcatctttattcattaaattcttccatatcacttaactgttcgaggtcagtttctaaatcagcagctgatttacttttactttctggagatttaaatttttcaacctttgagttaatcaattcatcaacttcagcttcaacaatttcattactatcaatagcacctaactgataagcacgtttaatagcatctcggaatggttgatgcttaaataaaggaccccagaatgtagtgcagttagtatcttttgcacgccaagatttttcttcgcgaatcatctcgccggtttcttcgtcaagaaattcacgagcataccaaccattcttaggttttactacaaatcctaattctagagccatatctaacaatccagaataaggatcgataccaccgtcaaatttaacatcaataaagaatttacttttttctttaacggtacgagatttttctacatttagaacaaattgatacccctgaagatcagaaccatctttaatctgacgtttaccgataatgaatacagtatcagccgaatacattacgcctgtaccacctgtcatcacggttttactaaacatttcaattgtttcaattgtatggttaaccgcaacacacggaatatttttaatgctaaaataaggagtaacgatacggaataatgacttcagtgatttagcacgagtcatatctgccacagatttttcattcaaggcatcttccgtttctttcttagaagccatattaccaattgagtcgatgaatactataaccttttcaccacgctcaatagcttcaagctgattcaccatatcaattttcagctgttcaactgattgaattggcgtatgaattacacgttccgggtcaactcccatggatcgcaaataagctggagtaataccaaattcgctatcatagaatagacaaaccgcgtcaggatatttgttcaaatatgccgcaaccatagtcaaagacatatttgatttaaagtgtttagaaggccctgcgaaaatagttaaaccagactgcataccgccatcaatcgcaccagaaatagcaatattcagcattggaatttttgtacggattacatccttttcattaaagaatttagatgtagtcagttcagcagtcattttagaagtggaagctttaatcaaacgggattttaaatctgcaatagacattcattttttccataggcatcattatattttcctcactggttaaagatagagtaattataacacaataaatttaggcattaatcaactgctattggatgaatagcattaaacttatgaaatgcttctgatttttctttacgtgaaacgcacatgcgaagaacctttaatggctcgtcttcttcacccaacgattttcgtttttcaatattagaagttttccaacgagcttgctctggaaactctctattgatttgctcaagcgctctattatgtttagaattactacgaattgaactgcacccgccaggagcttgtgcttttccagatacaaccagatatttgaacaaggccaaatgcggataaccttgattaattaaattgagaaatgcatacatatcttcgcacaaatcaatttttccatacccaatttgttctgtcgtaagttttccaaggtcataccatgtattcgtgaatccatatgaattttcacgataattaccccaagatgaagtaattttaaaaattggtagacgagcatgaccgtgataatacccgcaatccatggcatcttcaacatattgaatcaattcatagaactgttcacgagttaattgattaattttatctacgcgccgtttatcgtctctctttcgtattgaactcatacggatagtagtatcatcgtcaatcatccagattcgttgacctgcatacatatcagtaattgctttacgagtaccggcaattccattaacatcatcaggaatagttacaattttagctctagacccataggcatcataataagctttttcttcgtgttcacgcactacaatatggggttcataatcagtcggaaacatatcaagggcagaaactgcccctacacgttgatagcttggaattacgaattgaatcatttccactcaccgttataatcttttttcacaatatgagtttcgccagtattccaccaatgatcaaccaagtaaaaatgacgagaatatacatgaagacttccaacattccatataatagaacctgctttatactgacgagttgaatcgcctgcattcaaatcagatactaatttatctaatacgtatttttgccatgcataatcattacggaatccgaagaccacgtcatttgagcgcatgcttactactgcattgactttcttatcacgaatcaggtactgtactgtattagtacacatgaaatctgacataccatctttattgtagtcaaattgcatggatggacgagtataaatcatgataccacgccgagaatcaggattttgaccaagttcagctaaacacatatcatactgggcatagttatcttctgaccaaatagcccaaccataattcgagttaatttcgcctttagaagatgctacctgctgccaaatctttggtgtttcacctggaatatctttaacaaacaagctcttagatttataccattcaagttcgcgctgaatgtattcatcattaagagcgccaaaaataaacggttcatctgctacaaatgatgcgccaataatttcaatagttttaacaccggttttatcaactacgaaatctttttcttttaatgcaagccccaaatgaagacggatttcttcaactgtcatagagtcactaatcatttaaacctcaattgatacattcatatttaacttgtaacagtaataaaccccaccctatgataagagttggaatcatagcaggaactgttacgctatagtatatacttattataatcatcaagattaaaagcaacactgttataattttgcttttcattccttctctctgatgataattacttgatttggctgtgcagactttttagtttcacccgcaattgaccaaataaatgtaataaaccaaccaataattgaccagttaaacagtaaagatgtgaaaaagattcctactgtcgattttgacccacgcatcaaggcgatgaaccatggaagcatgtatataataatagccaacacacctgaaactaaaaccataaaaattgaacctgctactaaagtttccatgttttcctcacttagtcaaattttttacacatgaattataagaattcactacatactccatcggagcatttttaccagtacgccattggtaattattagcccaattagcccaaatttcggcgcagtagttttcaattttttcttcgcgtgtaattacatcagaattacgatatgcttgagcagattcatctggacgaatagcttcgtcaaaattcgcctgcatttgttcgactgtttgctttggagcttctttataacacttgacattaggattataaaacttgcttgaacagtttacaatttttcctgcatcagactgatttactaccggtccttgagctacacaaccagtaagacctaatgcaataaccaaaatagcgattttcataataatttcctcaaatgcaagtagtaattactccagtagtgcttatgcaggtattacccatttgcacacctaaagatccatttgtattcacatgaagattatcatcaattttaactgatattttaccattagtgtgaataacggtgctagattcaatcacaggttgagtatcattttcaacactaacaaatggaactgctgctaatgcaactaaacaaactgctaagcatcccataacaattttcatttcattctccaaatccgtatcagtagttgatagttgtatagtaccatagaagaacagggatgtaaacagttttgtgaaaaaatttttagggaatccaaagggtccagaatcatctctttttcataagtatagatttatattacttgtatgaaaaagggacctggaggtccctagatttattctatcagccaaacaggaagtctaacgaagctttttcttcatagtccatgccagccgattcacacatacccgcaagcggtttaacaaacgatttttggaacaaagttgagtggtcaatccaagatagcacatcagaacgaatttcttttggaagttctgtacccgatggccaagcaatgcacttgtcaccaaatggatttccttcacgtaatggaagaaccattactttatttccatccaaaattggagctacacccagaccactaacagctcgacgataagttagcacaccgcgaatatggaacgggcatttaaatcctggccaacctttatcatcatatttcgctatatcgttcgcagtttttacttcagcaataactttatagtcaagttgacgatattctttctcgaagttcttgtagtattcttggacagactcttcaccttcttgaagaatacgacgaatactttcttcgagagcttcttgcactgcttttggtgttgaactctgctgagtttccatacccatgatttttagatgcggttcagcaaatcgtttatcttccatatcataaacgttcagagcataacgctttttcgctttccaaaatccaccaacaccctttgaaccaagtggagggcaagaaatagcttcacggtccatatgcatcagatgctcgcggttattcatataatcacataactcacgatatgcaacatcaatcataggttccatctttttcttaccgaactgattcatgaattcaactaaatcgttctgctctttgaatcggtcaagaccaactttttcaataactttatctacacaaacatataccgaatcagtatcacctgctgcgatgaaatcttcgccattagttccgcatactttattcagatattcattaattttacgagcaatccactgaataccaacttggccgaaaattgtgatagcagtagcatttcgcaaatcatagtaacggaaatgaatattaccaagagcaccataaagactgttaataagaattttacggttcagctgatttgtgttagcaagtgtagctgctttttcacattcttcgatcagactattaagaacagattcagtataattcgatagttcatttaagaaatcatcactgaacttaacatatcgttcaacttctggtttagttgaacaagaccctgcgcctttcataataatctttttaatagcttcggcattcatttcttcagcgaacattttctttttccagtctttacgctggaaaaatactttagcgatttcctttggaatgataccttcttgatgtttatcatacatccatccattcggagaacaagaatattcatcactcggtttaggagctgttcctgcgatatattcatgaattggatgaactttaaattgtccacgaatagtttcaggactaatgttaacctgacgaataatgctaggatatagagacgtcaagtcaaaactcataatatatcgacgagcaattggtttaggttcaaacacaaatgcacccggaaaactttgtttaacgtgcgaaccttgttgaggaataaccttatgttcacctttcaatgagttaaaaataatagcatcccaggttttaataggactcattacaccagaaaaaggcattttagcataataagacatacttaaaactagatcgataaacccgcgaattttatcaattgcttgaactgattctacgtcaatgatgttataactaatgtatcgttgatgattagtctcacgaagtttattaataggaccatcatacggtaatttaccttttttggtttcatgttgagcaactgattccaaagagaatgacggcaaattagtaaaagcgaatttcttgtacaaatctaaataatcaagaatagatacgccatcaatagaataaatttctttgctaccgtacatattttgaattagtttagattttactcgaccgattggagagaagcgtttcatactacgttcaccgagaaccattttaacacgattcatgatatacggaacgtcaaatccctcaatattccaaccagtaaaaatagcaggtcgtttctgttcccagagattgatatattccatgagcatatcacgctcattatcgaatggcatataaattactcggtcaagaatttcttgaggaacttcatcaccaccttcacagtcaagcttagcagctaactttgcatcccattttgatactgaaccgtacattgaattcaaaaggtcgaaaacataaaaacgatcatcaattgaatcataatgagtgatagcatcaatttcatattctgctttcattgggtcaggaaatttatcaccagtaacctcaatgtcacagttagctacacgaacaaattttcggtcataaacaatttctgaaccatatgtatcactgatataagcgagtttaaaatcgttcataccgagagcttcgagaccgatgtcttccattcgtttcatccaatctcgagcatctttcattgatggaaatttttgaggagcgcagtttttaccatagatgtctttgtattttgactcttccttacaatgcctaaacatagtcggaagatattctacttcacgagtacgttcctttccgttttcatcaatataacgttcaacaatgttatttccgactgtttcaatagagatataaaattctttcatagatattccttagtttatagcccgagttattaggctcttgatatattatactccaaataaggggccgaagccccttgcttaaattagtactatttgtcggtgaaaaattgtcattccatctgcattaattgacttaacgactgcagtaaagtgtttttgttctgggtgaattaatttttgaaattctacctgaaattttagttgaaggttttctggtaaatcgaaaagtgtttctgttgcagaaagattatatttttctttaagagacgccatgtattcttgcggagttatagcagtcatattaattaccaatcgtatatttaggaacgagtttccattcatgtttttgtttaaaagaaataactcggaaattattagttaaatctttcataaaagttctttgaccaggaacgatttcaatcagtccccaatcttctaacagccatgcaatcgaatcacgacgaacttcatcttcttctgtcatttcaacttggcaaccatccatacgaagcatttctttaaaatgaacgatatagtatagtccttttttctgaagaatatgacaggactgatacagaactttatctttattattagcaattcccatacgagtcaaagtttcttttactttcagaaaatcttcaggttttttaagagtaatttcaatcattttaccattccaatgctagttttttgagttgtttctgttcttttacgttcttagtcacttctttcaaaaaatcatccgtgactaaaccttttagttcttttaatactaaaggaagttttccatttttagtaagaattgatttatagttaattgcatcatttgtattaacttgataccgcttagcaagtaacttaataatcaatacttcggtggaatcttcaaccagttttgcccatttaccatatcttttaccacgaggaactgcagccattagataattaaaatgagcttcatcacttaatccagaaccgattaaattcatagcatatacagctggcatgcactctggaaattgtgataatgcattttcaaccatgaattttgaataatctttttgagcaatagagcatttagttttattattaatagctccaattatttcaaaaaattcattttcagctttttctttaaaagaatcagcagcggattggacagctgtccaatcttttgaataccaagcaacttgatgctcgtttaattgaatatcatcttcaaataagctcatatcacttccactgcatttcgcatgctaattgaatgaaaagataagctaaatgcaattcagtattagctgcaataccatgatactgattattttcgcctacaatttcgtacatacgaataatactctgcggagttacacgtgaatagatttcttcggcaagtttaccaacgaaccacgaataatcagctgcatattttggtgctaaagctctgagttgtttaacatctttatttttgagagactcaagaacatcatcaatagcaccacgatcgttagtaaccagtgataaaataccagcatccaaaacacctttagatgaataactatcgagctcgccaatagttttacgaaaatcaggaaaattctttttaaccaaagctgctacaactttcatatcagctatagcaattccttcatgcttacagatttcagtcaatcgacgaatcatctgcttcatcatttcaattttatcttcatcggtcggttgaccgaatgtaataactcggcagcgtgactgaagcggtttaataataccatcaatattgttagcagtaataataatactacagtttgaactataagcttccataaaggagcgaagatgtcgctgagattctgctaaacctgaacggtcaaattcatcaataacgattactttttgacgaccatcaaatgaagcggcgctggcaaaattagtcaaaggaccacgaacgaaatcaattttacaatctgaaccattcacaaacatcatatcagcatttacatcatgacacaatgcttttgctacagttgttttacctgttcctggagaaggagaatgaagaataatatgtggaatcttacctttacttgtaatagatttaaaggtttctttatcaaaggcgggaagaatacattcatcgatagtagatggacgatatttctgttcaagaatgtgttctttttcatttacggtaatcataatttcctcattcaagttttagtgtaaattataaagggccgaagccctctattaaaaatcatgggtagaatcagcttcaagagctactacataattcgcatgttcaccttcaaatttagcagcgccttgtttaccttttgcccaaagcagaagtttataatttcctggttgcattttcatatttgccatattgataatgaaattaaatgtgttttcaccatcataatcaccaagagtcaaagaatatttaacacgagtcaaagcagaatcttctactttattaaaaccgttaattacgattttaccttcttttactgtgatagcaattgtatcaatctgcagaccgcgagatacacgcaacagctgttgaaggtcttcagctttaatttcggtaacaacagatgctaccgggaatggaattggtttattaggagcaactactgtactcggatcggctgctggccaaaaaattgttgaacgggcatcagcaattttaatatttccatcttctgactgggaaatttctgcatcatcattaactagcgacagaataccgagaaaaccgttcaaatcgtaaattgctacatcaaaatcaataacgtcagaaatatttgcttccgcgtaagttgtaccattaactgcgcgagtcataataaattgaccggatttaagcataatgccagagttaatagtagcgaaatttttaagcagagcagtagtatctttagacagtttcatgtaatttccttcaattcaaatgagatttaattttataactaatttaataaagcaattaacgattaaaatcagccgcaattgtttccgcaacaatttgagcagcaacaattagacgttcatctgcattaccgcaataatcatcttcaagacgttcaccacatgaagtcataataaatttagcaccggcgtttagggattctgtagtatgtttgcgcattagttcaatccatttattacttacttcacgatcgatagcttcataatacgcatgacgagcaggtgcagatttaattttgttctgaataacttccattgcgttatcagaaagagacaaaacccatgctcgacgaattttattttggttttgtggatttgattcagaacgcacgtgttttggctgaatatcttttacatcaacagtataattcacagtaattttagtcataatacacctttagtcataataatcagtaacagtccaagcttcatttctattggacattatttttgtatattctgctttaaatgcattcctaagcatagattcagtaactatatgctcttcattagaaaaattatttctcagaatatatcgttttatttcaggaatagttaatagatgctgtccggttgaatattccatgtttttcctccatagagattatactctaataaattaaagcataatctcttataaattaaaccattacagtaaatcgaccaactttcttcatttgaagatgctgaccgtatgcttgcgggtcatggtctctatgtgaaataacaaaaacgttagtattttttaaactatctaaaatagttgaaatagcttttacaccttcaacgtcggtcgctgaatcaaaaacttcgtcaagaattaacgtgtttattttaacacctgaaactttttcagcaatatcacgccaagtaaataaaagagcaatatcaattcgtgctttttcaccttgactgaatgaagcataactaaaatcttcgcgaccacgggatttaattgtctcattaaattcttcatctaatgtaaacacataatccgcttccattattttaagataatggttaatctgcttattaaataatggaatgtactttttaataatagcacctttaataccagaatctttgagcatatcagtcaaaattcctcggtggtatttttccattactaaattagtttttgtcttaacaattttatcaagttcttcttgaagcagtgctatttcatcagcatggtcaataaactcagaagatgctttttctatagccgctttaacctttttagctttatctactgctgcgatcagagattgctttttattgcgaatatcatttgccaacgactgttgggttttaatattatctcggtattcatcaacaagaacttttaaattatcacgatgtgttgaaagctgttcaaacgaatgcgtacattcagaaactttatctttaattttagaaacaactttatcaccggaactcaattgtgacaaacaggttggacataatccaccttcgtgatacatattaatgactttattatacgagtcaatttttgatttaattaaaactgcttcttgaccgattttattaaatgcatcagtcgggtcttcatctaaaacaatattaactaatctttcattagcttcttctatttccgattttagcgttctagcttcttttgccaaatcatcatacatattttgcagacgagtaagattgtcacccgttaattttttctggcgttcaacgttatcattatatattttaatttgttggataatactatcttttttaacgtcaagcacttggttttgtgaatttaattcacgtattagtgctttattaagcttatccatttcagctaatgttcctacctcaagtaggtcttccacaagctttcttcgcgcaggggtcgacaaacccatgaaaggggtataccctgctgtaccaaggacaacaatctgcttgaaactggcatatgacattccgataagctgttcaaattctgcttggaaatctttactgctggcagattcattaagacgtgtaccgttaacggtgatttcaaaaacgttcggcttttgtcctcttttgatatagtactttttctcatcatattccatccacagttcaactaaaagttctttcttatttgtgctgtttattaattggcctttctttacatcacgaaatggcttgccaaaaagcccaaatgtgatggcttctaacatagtagacttaccaccgccatttcgtccagtaataagagttttttgaaccttatctaattgaatgtcaataggatttccacctactgacattatattttgatacctaactcggtttagtttaaaattcttcacaaaagattccttttaatgtatcttttagaccattctatcatatcatcataatctaaaaagtattcatcaaattcagccatgcaaacaacgccttgtgctgtttttgatgtaatataaattattccaacatatctagaatcttcttcggtataatcaatgtttgctatgaattcatcattaatgtcaaatgtcgaaaacttcacagtatgcatccttaatacaagatacggccatatctcgtaatgatttaggtgtgtcattatctaaaatgttgaagttaaaggatacagcccagtcagtgcagaccgtaacctttttaatacaattatcttcaacctctagcggttcaaaccaatattcaataatttctttatgcccaatatcatcttttacttcgcattcaaaatgctgactcatcataacatttttaaattcatcaaaagtcattgtgttgcctctacatatagctgatttgcatattgaataagtgcttcacggtcagaatcggtgatgtctggaattgcattaatgtattcttccatcaatgtctgaagcgattgaacttcaacttcttcactgtcatctgactcgacagagttatcaatctttgacacaactcgtaatgaatgcacaactttctctagttcagattcgaacttcgtcagatttttgtctacttcagttactataacacgtactgatagatttgtaaaatctttatagtcaatttttcctttaaatggataatgaattctacgatgccaggtagtattatttggaataaattccattcgttctgtttctgtatcaaacatccagaacccacgagggtcattctcgtcacctgctgttagtgtccatggtgtcccaatatatctgacgttagcagcctcagaaatagtatggaagtgaccagaccacacttctttataagtcttaaggaaatcaggttcaagaccatgagatttcattcctttataaaaataaaatccattcagttcccagtgaccaacacaaaaagaagcagatgaagttttgatatgctcaagaatttcaccagtattttcttcacacatccaaggaattaaatcaattaaacatccgtcaaaatctactgtagtaggcttatcatatactttaacattaggatatttagccaaaagctcagtagaggcatttggatgcattacatttttatagtggagatcgtgatttcctacaatagtatgtaatgtgattccagcaccatcaagcatttgaactatttcacgggcaaactccatagttttatgcgtgattgcttttcgcacatcaaaaatatcaccatattgaatccatacagtaattccatttttcttagaatattctatcgcttgcttaattccatcaatttgaataccgcgaatccactcatcatcagctttaacgcctaaatgccaatcacctaaatttaaaattttcatatatcaagaaccgtcattgaaatgcaaaataaaattattgaaataaacccatctggtgtgctaaagaaaccaatccagcatgctctagtgaatagataaaatgcaagaaaaagtatcacatatccaagaaatatcattatatcaaactccgtataaagctaaagggccgaagccctttattttgtaataatgtcaaactgttctttaaagcagaagcttgaatcttgatgctgatacaaaaattcatatgctttttctcgctcacggtcataaagagctcggtcagatgacagttctttaatacgttcaaacgttgattccatatcattttcatcaaaccaaatgataccgctatcatgcgaggtcaaaggagtattatcaacacggaattttaaattttcgccagtagatttccaaaataccggaattgttccacatgcaccaagctcgagatgagtatattctaaagaacgttgcagatattttttatccaacttactcaactgataaccaaatccggatttactcatgcgttcaagcatttcgctatttacataacggtcaagaatttgcgttggcaaattaggagcaattttaatttggtctacttgatgaagacgataatactcgtatggaattcctttttctttaataggaatgaacgctggagaacgttccagaccttccataatagtacttagtcctgcaggtttaagatgtttttcatgaaaatcaaacatctgataaaaacctttccatgtagtcgtacgaccaatccaacggttgatattcatgttaatttcagaaacatctttccagtaggttgaccgaaccttcgcaatatccataggaggctgaaagttatatactgtcggtgcttcttcaatatcatcaaacagagaaacagtttctggataccattctttcatcagaactttattaaaatcaccattatcagaatggctaaaaataacatcagctcgacgaacagtttcttctaatcccaaatttcgacgcaaagaaagagaagaatggtcatgttgataaactacaacacgaaccgaaggtttaatgttatcaataatttttttatagttattaatagtgtcttcttcaactgaagtagcaggaactgaattgataattagaatatcacaatcatttaccagcttaagtgttttatcgtattcttttgccaataaaaccggaattgaaaatgatttataatcatgcgcgcaattacgagtaaatgatttatctttagcataaaccaaagttacttcatgaccatttttaataaaccaatcacgttgctcgagtgagaattttgttacaccacaaccttcaagacctcgagccataaaaatacatgctttcatttaatatcctctttgttttggtttattttaccaaaaatttataaagcaatataggagccgaagctcctatccacataatacgccatacagaggctcgttagaacttttaaattttatgcgcttatattttatagttccttctgctttagctttatcatgagactctttaaagcgtctcatcatttcctcttgagaggaacgaattttattataatctatttcagaagtctggtgttcatctttcataactgccaccattttttgacttgataagaatcaacccacactttcatattggggtctgctcttacaataggaggattaacttctttaattgaactatcatggtattctttttcagaaattttcacacaaagatgaccattcaaagattcagtaaatcctgcattaattttaagacgcttgaattttacgtgtgtaagcatcaatcatatcctcaatctgcgatctagtagtcttccaaagaatactgatgagttcatcgttatatggctgtttcagaatatcccgacttttcttgatagcatattcgtattgagcaaaattattgttttcagctgcgatctgagcgtgcttataaagacgattcagttcgcgtttgtttttagacaataacttatttgcttttctttctgcttcaagacggttcttttcttcaatagaagaaataagcttttccacttcatcattaatttcgggtttatcagtcatattatttctctaatataaaataaaaatcatcatctgttaaatgatacctgtaatttaattctacaccattagatttaaaagcggtatcatacggattttctggatcaatatcaatgtcaagagctaaaacttccctgagatacattttaagtaaatagggaatagcttcaacttcaggtatttcttccaagaatccggagaggttaatcgttagcctcatataaaaaatccaaactaggagaatcgtctacaacacttttcttttcagcccccggtgttctataggttgattcttcgtaatgcgtcattttatcgtagatgtcttgaataaaagtttcatctactaacgcaaccatatcgtcgtcacgactgtcatagacattgtgaacgaagtaactgtatttctttgcaacttccttacgttcttttttaatacgttggacgaatgcattaaaacaagcttgagttatatatgcatgcgggtttttatatttcgtttcatcaaaattgtgaagccccttaatagaagcttctataccatctgcaatcatttcttgtttccaagactgggtgtatcctgaaaagttgaaacgtttagataagccttctgcaataagcataatggctaatccgatagtatcattctgacgaactactttatttgggtctttattatttgctaattctgttttccaatcaataatagcttgtaaaagctctttattgtttacgtaattatatttaggcttagtttctgacattttcacctcttagctcaattcatagatctattatatcataatatttgaagatctatcttaaagcatagaggatatcagttatctaagtaaacagtatgcttggaacactttttccatcatctttttaaattcatgaatatctatgtaatgactagttaaatcagcatgatataaaaagtctaaaaacttttcatgtgtactaacatattcactttcatttaattcagaaacatggctttcccaatatccaacaccagtcttatttgggaaaaatgaaattttcatgtatttgtcaacatagaaaatgccataattttcaatagtaatagaaatattaataaatttcatacattcatcaacttagccgcttcaagagctgcatctagtgaatcaaattgatcaacatattcaatcaattcgccgtaattagcatataaccaccattggctaaattcatactcaaggatgaatccgtttccttcaatttgagttaaaccaatgccatttgtatttacttcatacccagcaagacgtaaatcgttaataagagcttcgttcataattataccttagtaattttcaggtctgcaaattttttcttgcgttgatttttcatgcgacgaatagttttatcggaaatttcatgcttttgataagctttagattctacaccaaaagctttaacatcaaattctgacaagatatattgaaccaacaattcacggacagtattgcgtccaatcttctgatcattctgtttcatcatttgatgaagctctttttcccatttatccaaaatttgaggagttacaatatcgcctttttctagcaaagaaactactttatcatatgcgtaagaattgatggcgtttttaatttgaatagtcatacattatcctcaattgcgttaaaattttattatccaaaaagggccgaagcccttagctaaactttttggcacccttccagccttcgtacatcattgcgactgacaatgacaaagctccttcgcatgctgcatacttattattccagaaccaatttagaaaaacttcatcctcaataccattgtgtttcatgttctggaaaaatttggcgcgttcttcagcaattcgctgcgataatttagattcaggattcatttaaatttcccaattgccattttcatcaataaatttaatccagtcatttactgaccacttagttgtatcgccttttggagtaacatttaaagtatataacccctgcttaaaaagcattcgtttgatattcatattttcctcagctataacgataacactcgtttgatttacgtttagcaactcgttgagaagtattataatcaaaatcatcgtcaatgtaaactgattttttcaactttcttacttcaccgcgtaattgacgatttaactcatctttaacttctgaatcaatacctttcattctacgccatttatctgagcgaaaaatgttttcaaccatatctttatgacttacaccatcaggagctttacgctttccgaaatagtcataatcacgaactttcaagtctttacgacgatacgttttacccatggagtttaatttccttagcaactgaactaaatgcagcacgatcgcaaatcatgcgtttatgtaacttgagtataatatagcaaacttcaaaactatttacatgagtaacacgaacagcattaccattaatgagataatactgtccctttttaatttctttatcaaccataaccatatcaattcctcaaaggcaattcatatgttaataataccacagtttgagctcgttgtaaacaactttgtgaaaattattttagggaatgataagaagggaacgatagcttagaatggtaatatacagaatgtgagaaagaaggacccagagggcccgtcttagtcttctatgatatctctatcatatccaagtgaaatgagagtttctttgaagtgtttaatgttcttttgtctagaatcattaatgaaaatgactggataacgaatgttaagagatgtgaatccagcgcgtttagcaagagatacaatcagcggacgatcatactcaatcttaccgttatttgtaagaactttatagaaagtaaaaggagcattgagctcctttagaagttttgtaactgattgacatccaggacaacgacctacttcttcggggatgccatagatttcaatcttattctttaagttcgagttttgttccacgagaaataattccttgataagcccagtatggcgggttaacagaatcctcaccagagttttcttcaggaaaataaacctggataacgaagccggattcatcaaaggtgaaataagtagtaggcagttcacctaacaaatcggcacgagcgttgatttcttcgaggtcttgttcacgtccagtccagaagcttgggttcagactacattcatagaaataatagtcattaccgaacatatcaaaaccattccaactctctactacataccgctcaaaactaatcataattaagcctttttatcaagaacagcattcagcttgttagtaattttatccagacgctcattaaactcactagaagataagcccttttctggagaaattaaactaatcacgaaaaatatagcaataaaaggaataagaaaaatagcaccaactgccataaacaaaaagaacgttacagttgtaagaaaatcagctaaacctttacgaaatttatacatattttacccttaattgattaaccaagcattgataagcactaaactatattgcgaataaaattctggaccaaaatgaaaaatcatatcatttatagtatccataatgtaattcaatttaatcatgtgtccacaccccatcgatatttgaccaaagtcgctgattatctgatcctcgccacagctttttggtcggaagatttttctcatacttcccatcaataataacatcaacatatttaagcatttctagttgtttaatatcttcaaacttatatcctgtccacaaccaaatgcttttattgggataaagattttttactgtttgaacgatgcaatgaataacatctcggttatcaggatagagagggtctcctccagttatagttaatccttctatataatcattattcaaacattcaattaattgttctagtgtttcaccagtgaatggaataccatttctagcattccatgttgatttattataacacccttcacatttatgcaaacaacctgtaacgaaaagaactaccctgcaaccagggccattcacaaaatcgcaaggataaaatctatcataattcattgatgcttaaccctatgcatgatttctttatttttgccgagattaaatccgcgttcgttcggatttcccaaataaccacatgttcttcttattgtattcatctttttaggatcagtttctccacaaatagaacaaacaaatccgttttcagtaggagtcatttcatgggtacttccgcatgtaaaacatttatctaccggcatgttaacaccaaaataatctaaatgttgtgcagcataatcccatacggcctcaagacctttcaagttatttttcatatcaggaagttcaacataagaaatgtgaccacctgtcgcaatgaaatgatatggcgcttcacgagaaatcttttcaaacggagtaatattttcttctactgagacatggaaactgttagtgtaccagcctttatcggtaacatcttttacgcttccatatttttctgtatcgagtttacagaagcgataacaaaggttttcagcaggagtcgaatataaactaaaagcaaatccggttctttcagtccactgtttaagatgagcattcattttagttaaaatttctcgtccaatatcacgaccgacaagaatattcaattcgtgaataccaatgtatcctaaagacactgaacttctgccgtttttaaataactcaattatatcgtcatcaggtttaagacgaaccccgaatgcaccttcttgataaagaataggagcaacagtagctttaactccttttaaggaactaattctacacatcaaagcttcaaaacataaatccattcgctcattgaacaattcgataaatttctgttcattgaactgtgttccaatataagaatctaatgcgatacgaggaagattcagtgttacaacaccaagattattacgtccatcaagaatttcattaccggttgaatctttccacgcactcaagaaactgcggcaacccattggagaaacaggaatagatgagccggtgatagctttattgttcttagctgaaataatatcaggatacattcttttgcttgcgcactctagagcaagctgcttaatatcatagttcggatcgtctttataaagattaacaccttcttcaacaaacataacaagcttagggaaaataggagttattccatcacgaccaagacctttaatacgatttttcagaattgctttctgaatcattcgttcagtccagtcagttcctgtaccaaatgtaattgttacaaaaggtgtttgtccgtttgaactaaagagagtatttacttcatattcataagcttggaatgcatcgtatacatctttttctgttttagattgagcataattcaacgcatcagcgatttgccatttttctgcatcctcaatatgttttgcataggtgcgtttaacataaggagaaagtactttatcgacattagcaaatgtagttccgccatattggtgagaagcaacctgtgcagtaatttgtgccataattgcagtagcaacaccgattgatttaggagtttcaatctgtgcattaccaagcttaaatccgttctcaagcattccttttaaatctactaaacaacaattagtaaatggaagagcaggggaataatcaatatcgtggaaatggataattccgctttcatgcgctttcataataaaagacgggaccatatttttggcaatgtgtttagacacaataccagccataaggtcccgttgagttggaaaaacacgagaatctttattagcattctcgtttaaaaggtctttattagttttatgaatcaatccttcaatttctttttcaattgtcattttaaactctttctaagctgcttcttaaatgaagctattaactgtgttttggtgtcagattcattatattcaaatcctctttgaagcatctcggccatcatttcctcttttcctaaacgagaaaattcctttgatttatctccaacaaagttagggtgaatattattttgggtgtaatcggattttaaataagtaagtaaattttctaaccattcaagataatcaacaccttgtccctttaagccagaacgattaaatttatgcttcatttgaccttctgtagcattgcagagattacaaagcaatccacgtatctttcctgcttttggtccatttaattcatggtcatggtcgaggtgattagcttgaacatcaggatttagttctcgttggcaaattaagcatttaccgttttgtgcattataaaatttttgtttttcttctttgtataatttgccagtcaataacataataaaacccttaccttaaatagataagggtatttattatttttaagtattgtaaaacattcgatgcaatcgtttatactgtcgaatcatctttttagtaggacgagaataggttcctacgcaagtggtcatatgagggtccgtagaatgtcctttaataaaaagtttccaaaccttaccgccatttaacttttcagtataaaccaattcggttttcattaaaatgtcctgtcagaaaaagaattttgagttttttcaagtattgtaaaacatttgatgcaatcgcttatattgccgaatcttttggtcagaaaaagaaatttgagtttcaagccattcaatgtactctgcggcagcttgcatcaggttaccttcatagccatcgttattttcttgcgcagctaatttagctaatgcgtatgaaatacgttcaccttgaaaagcggctttaggcttctgaacatcttggctagttctctctacaacttcttcaatttcgccattttcaacggattcagtattccataaacaccagtatgtaattggcttatcatagatgttaataatctttccgtcggaaagttcaatttcaataattccagtatcaggttctatatcatcttcgcattcttttgcaagttcacgaactttaaagacagtacctgcactaagttccggccagtaattacatagccctgtatcaacacgattaattctaaaccacttatctactgtaatcatgtcccatctccatatcaattaagtcatttatcgttggttcattatatactgtttcttcatcagtgtaaaccggttcttccggctctggctctacagtttcccatctagccgcccaccaaggtttaaccccgaagcttattaagttcttcataatcaatccaggattctaatcctgatggcaaatcagattcaatttcccaaagaagctcttcaattttctgaagacgatctagttcttcggctggaatagtaaccattgacggagctcgtgatacattaatatcgtaaatcatatttaccccaatttaaccatacaatcgccgtatttccacttagaaatagacttttcaccattagaataataaacttcgagtttagcacgattatttttaatttgaataaccttggctgtcatcaaagttccatacccataataaactgcaacttcatcacctacatataccgcgcttccgcggtaatcatgaatatagtcagttccttcaagcatcatttaaaatattctcgcagttggtcaaatccaccaatatgacttccatcaggagcaaatacctggggcattgtcaagccgatttgagtatcacgacctagtttagtcagaagctcagcaattttctcatcatcaaaaacacctttttccggcataatgttgataaattcaaacggctgtttcttcacggtcaaaagacgttttgcattatcgcaatacacacatttatgaatgttgctatcataaccatatactttaaacatattattccttaattcctagtacttgtttaaaagtctcgtcgtaatcaagactttggcccgtttgttctttatgtttgtatataatatcacttacttctgatagcatatttttatatgaacgagttaaagcagatttaagcacgctgtatctatcaggaaatttaccgtgttcattataataagctattgctaattcacggactgccttttcagcagcctccatatattctttacgcttggtcatttttaatccaaaatattattaggcattggttgaacactcacaagttctttaaagaactcagtagagtcaggcaatttaaccatttccggagcatgcttactgaatttatgtttacattgacggcatttatattcaagctctggtttacgccagttaatcaactgaacttgttcagtaccgcattcagggcaattaggaacgtttttagaagctctttcacgtcgttcaaccatagccataatagcatcccatgctggaggtttaaaatctaaatcgtcgcagccgtgaatctttccacgcatttccatatcatcttcctcaccagccataataattttaattaaactggaattacttgaagctgcaatgtcttctaataaacgctttttcatttcaatacctcaatagcattacgtaaaccatttgcttttgcattaagagcttttaacaatttggtgtgttctgcaatttgggcttcaacttcaatcaaacgggcattgagatattcacgttcttcactcagattatcaaccttttctactttaggctcttttacaactgtcttatatgtattagggttcttcaatttaattagaatgcgtgaactgtataacattgaaccattatcttcggtttcgtcatacatttccactacgtccataatttttaacatcatgcggagtttataagacaacgaacgaatagttttgttgtgcttattaatttctttagctgtcatggtgccaagattacgtgagtaataataaggaacctggatattaattaatactgatgaaccacctggcttgtgtgttacttcatcagcaataacccagtccttaacatgaactgtatttgtacggtcatcgcccgcggtaaatagtttgcgagcatgcttaaaaagcatattcacttggtcatttaattgacaagcaaatttatcagcaaatttagtttcaggaatggtagaaaaccaatcagccaaatgagtctttttaacatcattaacaatagtaaattcaaccaaatcggttatagatgtctcagatttaatgaagctcggcttcataaagtttttaatgttctcatgagctacagtagaagataacatacgagaacgtttaaaccattcaagcaaattgcctaacgaatgagaataagcgttttgagtatctttacagatatgattttcctgaccaacatattgaaggaaatcacgaagaatattattgattactgctctgtgcccgatctgataattacggtgtttagtaataagactgtcaaaataatcaatataatgtttacgagttttcatattcttctcacttggttaatggtttatactccgagccatccttggctttaaattacttaattaactgtaaagcttgttcaagacgatcaagacgattaacggattcttcccaaatctttttagcctgctcatattctttctgcgctttattagaaatttctagaacttctttataagctttttctagtgcaataacttctggacgaatttctactggttcaggcgaatcgtcaagacattccattagttcctcaagggtagtttcttctttaggagtattcacaatttcatcacatttttgttggtaaatttctttatcagtcggtgagtacgcacactttacttcacggagactaactacaattttatatccttcccaaccgcatatattcttaaaaggataagtatgaatattttctactgtttccatacaaagtaatgcggtctctaactgacgagttatatcgctagcaattgagaaaaatttattaatgttcttttgattagcttctggtgtaaaaaattcataattcacaaaaatagctgctttatttttatcaagctcatattcttttatgataatcatatcagaagcccaaggatggatttgacgataatcaccatagcataatttagaagctgattttagaatttgcttcttgaaaagtctaaaattactaatccaacgacgagtaaaaatattctcagggtcttctttattattaagatgataagaattaacatcaccgaaccaactgtatcctactacatctttagttcgtttaatttctttcccaaatttaccaagaatatcttgattaactaaatatgaaagaagacgagaacctttaaaagtttccttaatatcatctttatattcgcgactagaaattttatgaacttcatgaataaatttgcttgaagaaacaatacttgcatcaatattattgagccattgattgataatggaaataacactattctgactaaacacaggtttaactttatcatcaataacgctattgaatgatttgatatattcgttacgagtcatattaatctcctcagtagaaagtaagaacattataccacatccttgtggcaaagtaaactagtttagtgcatttagtgcattgttcagtttagaacgttgcttcgtaagatttttgactttttcttgagctttttctagcatcttttcagcttctaacacttcattagttgctttaacgagttcatcatctactgccttgatagacttctcaatcgcatccgcgtgccatttttcaacaggtttaagactcggattttcaacaggaagaaaattcactttattgaatttccatgtatctttattacctgaactatacatccaaaatttaggatcgtttgatgagtaattggataaatttaagatatcttgcacttcctgctttttctcttgcgggacttcgtcctttctcaaaaaatcgtatttaaatgaaacgatcatatcaagttcatacgttgttgtatgttcccaatttcgctcaaaacgaggtaaaatcttagactgaaccgcggcaactacatccatatacttaaatgcttctgtcaactgtgatttaaggcattcacaaattgaaagagaattttttgtattaggtttaaagctaattcgtgcagttctgttattttcttttaatggtcttacttccatctgaagagtataaccatcaaatttcagattctttaagttaatatcagaaccttttaatcgactagccgtcgacaaaatttgctttaattgtttacggaatagagcaataaatctccactcaatacgataatgatttggattgaaaaatccagatgataaatcgaccttactctgaccaacaccttgaacaaatagaggatttttataatcaatagttttacagaaatcagtgagctgctcacgagcagtcatttgtgtaatataccccgctttactaaaatgacgtaataattcactgctatttagatatttaaagtgaatagcacgattaactttatcagggtctaaattattttcacacaaaaatgtcataacattacgagtatcgctgccagtacgaaccatatcttcaatttgagaacgagttttcatggtgttccttaagatttaagtaaatcaacaattttaattaacttttcacgctcagatttagctttactactcagtccagatagtctgaaaatttcatcatcatattgttgaatagaaatattcagctcttcaatctgtttattaaaataatcaatttgttcagaatgtttttcgttactacgaactggtacaggttttgtaggcaatttagttgaactggattcatccgggcgataaattaaaacacaacttgaaccaatagggcattttgcaccagatgaatattctaatgttccagcttcttttaaaacttcaaaagctaaacagagatgatgccccatattaacataatctgtagagcgagctctgatgtaataatcatcgccgcgaatactaaatttaaagcatttaaggtcttctgtattattggtcttaaaaatcatttgtttatctagacctttagctaatcgagcgcctaatgctaataatcgtctttgattttcccacaaatccgcaatcatttgatcgaatgataattttggcattagtcgaccataaaggtcatatcctttattataattacgaaggatttcactcgcattaatacgagacaatgctccaattttattaagggctttcataatgcgattagataaactcattccagatccgtttgttcgctgcaaatgtttttctaatccaaatccaatatcaactttaaacttatctaaaatttctgcatgaacatctctgtcaataacattcaaatccaaagttgagttaaatctatgaaaaaatttatctggctctgcactgcgaaatacagtccattcattcatcatttttttattaactaaagatttaattactgcattgacattattaattactactgacatattttcctcactcaatttcaattttactaaatatacagaataagatggaacagactatataagcaccacacacagattgaactaataccattccaaagaaccaaacaatattatcaaacaatgtctgttttacgtcgaaaggacgtaaacttacagtaatattatcacctttttctattgaagaatacatctctggggaaatatattcactaaatctataaccatctttgagttcatatacggcaataaacgataaactagacccttttccttgtgttcctgtaatggtattaactacagtaacatcataatctttataatgcatataatcattaattgcgtaataaccatatgcaattactacacataaacaacatatcaataaattcaatcttttaattatcaactgtttcataataatctcaattaaaagggcttagaaccattataccatccttggtataaagcggttatgcgagtaccgtctttaaccgttcttcaaacttccgaagagtattttggcgttcagctctttgctttttgtaagtttcaatacgctctgaaatgagagtgtatcgttcatttactgattctttcataaaatcaggaatttcacgagaagctttaatctcgtcaaatttatcaataacagcttgctcttcagcaattaagttatcatacattaaaatatctttcttgataaactcaatatcttcttgagttacacgagataatttagatgctttatcctttttgtactgttcgttagtatcacgagaccagtgtaatgtacgatttttattcgtatttttgtaaatttctacaataccgatctcatcgataataacgatccaattccaacgggatttgtaaatttgtcctccatcaacagtgatttcacctccgattgagatgtcattaaagaacttgctttgcgcttcagatttaaatttaccatcgttgtaatttactaagttgaaaatatctttagcgttcattttctgttcctccgtagttgatagttgtatagtaccacagaggaacagtcttgtaaaccactaaaagaaacttctttcacaattttttccactgaaccatgcgcttaccgctttcttagtctcaggagcagtgttatccataaaccattcaaaggcagcctttttatgattctggagggcttctcgggctttaatctgctcacggtctattaacactaacatatgagcctttcttgtcaccatgggcttcttatgattttttgaatactcccagtcatttgtccatcgcattgtcgttgcgaacttaaatactgcttctttaattttagtttcgtaaatttcacgagcctttgagtataacatcattacctccattcaccagtttaattctagtcatctttttaatggcagtccatataatctatttctgaactgcctttttgtcatagaagtcctcttatgaattatttcagaagagtaacctcagcaatttcttcccaaccgtttttgtcggtcataataaagtcagcaagataaagagcagtacgcagtgaaacattgcgtaaacgattaacattaactttcatccatgataatgctttataagtttcttcatcagaaagaccgcgcttttgcatcatgtcagttgaaagaataacatcttcaaccctgaccataatttcttcattagtgtgaacacccaaatccaaataaaccgagcgggacactaatgcttgtaaatgtggagcaagtttagtaccacggtctaattcgcggtcaatgtcaacgtttgtgataaaaacaatcgttcctttaaattcaaactcacgctcaatgcctttttcttctaagtaagaagacgcagtgctccagcagactttacgggtctctccggtgtccagagcagctttcagaagattaagaatgtccatatcagagaaaacatccacatcatcaatcaaaaggacagaattctcttcacgattattccaaagctgttcataaagaccaataccagagattttaccattaatgcttttatattcaatgtatccaatatcatttgctttatttaaagctttatctaaagaatacgttttaccaatgcctgccgcaccagagataattaatgaacgaatgtttccgttaataataccattcgtcatcattcccataacattaaatcttttattaatgcgggttttcatatcttcatacgattctttaacttcttcaacttttacaccatcatatgaaatgtctgatttgtaaacccaaacaccgcgacgtttaccgtcaatttcaacaaaaactttaccatctccttgtgcatctactggagcattatctgggaaccattcgcctaagagctcaaaagttccagagatttctttaccgaagtagatacccttattgatagttacagttttcattttattctccaaatccgtatcagttgatagttgtatagtaccataaagctttatgcttgtaaacaattttgtgaaaaaatttttgaaataaaaaaagggagcccgaaggctccctatcatttataataacttcggtggttttcaagataaaccctctcaaggaagtcatcccaaaaacccatgtctactttttgctgcataccgttcttagaagcttcagtagatgctgcttctacttgatcgaccacatcttccaaaaactcttgaaccgttttaaatggatgtttacccaacttcacgtcgagaataaatggagcatcttggagtggataaaccaagtcaccagttttgtaaatttccaatagttggagtccaccacggcaagcatgactcatagctttccagtcaataccttcattggcttcggccttacgagcacgttcaccgtattcagcatctaatttgttcagtgactgcttaagctcaataagagaaagcgttgtctgatatttacgacccaacactgtgtagaacgtctgtgggcctgttttctcatgattatggaacacccattcacagaattcgttttctggaagacgatgcttaatatcttcaactttagtacgacgctgcttaatagaaccatcttcttggtaatcaacccattgctcagggatttgattaactactttcaatacatcacgtaatgcagccaaacgagaacccttaacgccgtatttagaagcttgcttacggacatatcctaaataggatttcatgttagtcgtataaaaacgagaacggttgtcttgaataaacttccacacatcaggcaaatcagatttaaccactagttcaggtggagtgtgaagcatatctaacgctacagtttcaccatctgctgctaatttaaagaaatatttaagactgtatagttcatggtcaatatcatctttagtgtttttagatgatgtgttgttagtgtttttactcatgtgctctttaacatttccgataagaatatcacgagcaggaggaacaaagatttctttaaaatctacatcagattctggggtagaagttccataaagatgactaccaaaatagcttttcattactgttttcatcattcagccttatattcaataacaggacatactttagctttacgagcttttaaaaattcaacgataatcgatttcttgggttgaataggaggtaaacctttatacgccctatcaatattttctacgtgtaaagcataatcctttttccatttataatctttatatttttcacgcagttgtgcaggaataacaaatgaaccgataataagtaaaacaagcaaaatggcaagtataaatgctgatggaataagagtccataaactaccaaaaataagccatttctgtatgatttctgcgcagatgatagttagacctacgagtatagtacatccgaaaaaagaaacgaaaaatgtagggataacaatagaccaaaagtatgcgcacagcgtcttaggtcgttgccattcatcgttaaacaatttgaataatttatagtgccaagagttttcattaataatcataattatcctttcattgaaggtgtaacagttgttaaatacttaatcatagcttcagcttctgattttgataatgaaatttcttcattgttttgacgaatagaaataaaatccggatgacggtcaccaccagcttttaaaacacacatataagtatcagtttcatcttcaatatctgaaatgattgaagcagttccacatgaatgtggtttttgataaatcaatacagcttttcttccaccgtttgactgttcataaacttttaacacatcaaacaaatcgcttcttttatcaatagctaagatgttgttttcatcttcaatattaaatccttcggatacttcataaagtgtcacccataaatcaccaatatcaataacagcgttcacttttccatgactttcaagagcattacaaattttcttaatttcatcataactcattttaataatatcatctccttgaataaggaagatgtcatttttaaattcaacacgaattaaaccacttccacttgaaataaacatatttcctcactttgaaatcatagttggaatgacagaatcgagataagtctttagcgcaatagcttcgtctttggtaaatgtgacaatatacgatcgaaaatcatcaatttgacgaatagttaagacatcaccatcttcatagcattttgatacgtttaaaacagtttcatcattctgattgcaagcgttagtaataatagcattgcaatttttgagccattttaaactatgttttctttcattagaataataaaaatatttaatcttatctataaaactatcccaatggataactgataaacacattgactcacttttaatattaaatcctgggcatgaagaataaaaatgaattttgtgctcatcattgatgcttactattttatcagtataaggatattcaatttgggttaaatgaatgatttcactaggcgtaaaatatagcatatcgtcttcttgtgtcaaacgatacatattatttactttttctatagctaattcaccaaaaagcggactaacttctaatactaatcgtttcatattgattctcttcgactcacccacaattacatactcctttgaataatatcaataatgttgttcaccagattataagtaaacattggataattatattgaatcatcacatacacaacaaacaaaactttcattctcttctccttggcagttgacaagattactatatcataatcttgtcaacttgtaaaccattaaatgacgttttcaataaaattctgaagctttgtgtgagcatcaaccatgattttcatttcttctttggcgaaagctgtacctctttcccgagaagaacactcatagtcagaaactgcattagcatattcttcaattagtttcattaaaaacatctgcttttcagttttcattgttccacctaatcatttcaagatattgaactaacttagctttagatttatccaaatcctttttagctgcttctataccatcgtatgaatatccttcacaatgctcaactgctaattgatatgaatctatttcaatatcacgtgctaatttaatgattttttcaaactgttcgcgtgttagcatacttacactctcgtattatgatcgataatttcatcaagaaacatatctaacgcttctatagcattatcaactttagcttcaagttcttcagcgcctttatttgcaatgcctgccgaaaaccaagcaaagtcactaagttcctcatctgctttgcgaattaaagctaccaattctttaattttatctgcttgttcaatgctagtcattattccaccacatatgaaagagagaatattgcacacgccatatgagttgcagcttcatcacacatatcataacgtttcttaagaagttctacaagttcttcactagtaacttcatccatgtcgacgaaaaaatcaccattaatgatgacgtagatatttccttcttgattgagtgcttcaattttcatgatgttctcctctttatccgacggttgtatagtatcacagctcaaattgaaagtaaactggtaaaatgaaaaaagtctcccgaaggagactaatgttattcgagggaaagaagatatttgctctggtaaaacatcccagtaatatcatctatcgtgctttgaatggctggaggcatttctttataaatgctgttagattggtctagtatgcgatcaatcattttaattgtgtcggtaggaagtttactggcatctggaatagaaggcgtgtattttctaccagaataccccaaatattgctcaccaaatttatcaatcaaatctggcaactcagagaaaataaaatcgtatgctttgtgtctagcataacttttagtttcaaaatgcgcagaatgaaaataagcttgtgcagccattaataaacctaagtattcatctgcctttgaaggttttccactttgtgaaaagtcgctgaatttcattcagtctccaatttaatgttcataattctagcgtatgattgtgccatctccgcgcctcgctctatacattcaaaatcggaagagcacgggtcatttttataagtcgttcgcataaaactatagaactgttcagatgattctacgcttttgttttcaaaaagcatataaacgtgtctaataccagattccataaatttatcaaaatgaggatcgacattcgcttcaattggtggagataaagcaaacgctaatcctagcatggcaaatagtgccgttgcttttaaggccataaaggcctcctatcatttttgtcctgtatttactttatgccgatgcacggccttaactttatcaaggtatttttcaaaatttcgcaatctagtatagtctgccggagattggttgagtgatacttctcgacgcaaagctgaaatgatatttccaacttccctacgaatttcatctaattgaagaacagtaagattgcgaagttgcttttcagttaattgtagcatatatacccctttagttagataaacctatttataacttttgcactaaccgagctttttagttaattcattccaatgttttctacacaaagaaacataaatttcatcaccaatacagatttgattaccttctttaactggtgttccatcttccattaatcgagctgtcataatagcttttttaccacaatgacaaactgcctttagttcaataagtttatctgcaatcgccaaaagttctttagaaccttcaaataattttccagcgaaatcagtccttagcccataagccataacaggaacattatatgtatcaacaattcgacttaattgatgcacctgttcagtttttaaaaactgagcttcatctacaaatacacaatgaatatctttttgtgcttcagcccatttatagaactcaaaaatatccatatcatccgtaataatattcgcttcctgcttaattccaatgcgagaaacgacttcacagacagaatcgcgagtatcaatagcaggcttaagaactaatacacccattccgcgttctttataattatgtgcagcagtcaaaagagaagcagattttccagcattcattgctgcgtaagtaaaaattaaactcgccatatcaccttcttaaagcatattcacataagctattaattcgttttctttcttatcaaaccgatcagcaaattcttcttgctgttcgggagatagcgggccgtattcatcataaaaggtgtttgcttctgtatgctcatctagaagttcatggataagctcaaacaatttatctttttgttctttactcagactcatatattaatttccaggagttttaaaataattcgcttttgcttaaatatttccatagttaaatgaccagtatctttttgaccgattccaatggcaaaacctttattgacagcgagttcaattaaattatcaagctcacgtaacacttcatactgtaactcaaaactattcatttcggtttaccttctttaacgaaatctggataaggataaaatcccgaataaaatccttcacctttatgattgatgcatcctttattagaacaatagcaccaataatcgaaatcacaagccatttcatcgttgcataaagcaaaaacaactggccatttacacttttcacaatgggcatttttaagaatactagtttggctcataaccatgtaacctttaagcagtattcttctacatgctgtttacgacctttcttatcaataaaggtatattcaacgaatgttccaatgtagtctttatctacatcatgcggactattaattggacatttagtacggcaaatgcgttcccattgacgaataattactgccttattctttgggtcatatggatgtggataatgtatattcataataacggttcccaatcaacaatcacaatttctaatttagaggaatatgtatctaaaatcccctcaataatatcccagttccctttacctatgcctgcaccaatcctaggcatatagattgtaggtttaatcagtttattttcaccaaactcatttaattctaacatacaattcattaaagcggaatactcaaaatttggccctggttgaaattgagtataaaggttgaagcaatacgctttatgagtcctaaagtatttttcatagactgagtaagaaccgagtttagttacatcaccccattcagtctgtaatttatcagcttccaaaattttagggaaagctttggttaattgacccgctacgcctgaacccatagtatgaaaacaattgcatccatgcgcaatatttttaccttcagcgaaaagggcgacaatatcgcccttgatatattttacaatcatctagtactcaatcctcgattataagaatctaccaaacggtcaaccattgaatgacaagcggctttatctttctcctccgcaactgaacattctaaggtattccactttttagcatatcgttttaataatgtatcgtttttgtatctgcttgatttatctctttctccgtctttatatgcatatattaatttctgcgcaaattcagcttggcatgctttatttttcccacaataatccgcggcagtacggtttacatactctctaatttcagtatatgatgtatctgctaacgcagaaaatgaaattaatcctatacataaaaccaaaattttagtcatttactatttccaaaagtttattatttttaaggtaattagccttttctaggacttcagaagcatatttagaaccagctttaacattccatcccgaattataagaggatattgcttttcttatatcgcccttatgtatatttaaccaataagaaagttcaatgtacgcccaggaagctgaattggaccgtttattcaacattctttttatttcagcatcggtcatattataaccaagttccttgactctcgctcgcatagtaggcaaataattttggaacattccataagcgtgatgctttggtttagattttaaattaactccgccagagctttcttgccataaaatggctgccattatatggcctaatccgctcttgtggatgtttttgtgtgttttatattttccatccttagaaaattgttccccgaattgatacgcgtaacgcatgttatcgagttggacattactgaaagtatgctcggagctatgtgccatcattgaaatggccaatagaccagcgagtagtgcttttctcatgcttacctcattgagttttaattactgctttagaagcctttcctggtaaacgacgactattgataattgccatcctgcattgaagcgacgggtctttgaacttcgcattaggtttacaaactgtaaatccaagccaaagatttccatctgtgatttctaaacgtccaggacggtattcaaccccatcaataaaatcctcatcaatgtcaggacgcggaggcatactcaggaattcattaacttctaaaacatggtcttttattttgtggaataattcaaaaacatatgtctcatcaatctcccgttgaattgcacgatcaagaagatgctgagaatattttagatgaaacgatgagacccctgctgcttttgatgcctcacgaatctcattgttaatttgacgaaactccgactcaaagtgacgacgaagcttatttcgacggataaaaacttctgtgttgatagtcatgttattctcctcttaactgatagaaaaattataccacagtcaagaggaaaagtaaacagttattctttaaatctaatcaatttattcatagactttgaaacttcggcacgaacctcatgtagatttttgagctgttcaagacgctgcgtatagtaagcaatttcatcttcttcgagacagtcctgtgaatcttctttaagataccgtgcatagtcctggaaagcgttacggactacttcctggaagtcatcaagactttgaattttcttaggagcagcagacacacgacgagggcagtataatactcataaccaaaccctgcgcttaattgagccattagtatttttcctctggttggaacacagcacgacaagcccacatactggcttctttgagtttcgttttagcaatagctaactgatcgaggctttcagcataattcttcgcgagttcaaagtcttcgcaattatctagtgcttcccagaattcatcatataaagcatcaaagataagtcctaaacgaacttcagcgtctttaatagcatttactttaccgattttttcgtcggtatgtggcttataacctttaatatcttcaatcatatttgacttcctcaccagtacataaatcgtattcaactaaacgaataggttcatgaatgccatatccttgaacagaaatttctgtcgtaggataaattccattaatatcacccatgttccatgcttcgttaaattgctgttcgcctgaattactaaaccactcggcgaaagcatttagcacatcttcagaaccttcaataattatctttgccattacaaactctcggtgaaggtacgagcgataacgtcgcgctgctgttccggagtcagagagttaaagcgaactgcataaccggatacacggatggtcagctgcggatatttttccggatgcttaactgcatcttccagagtttcacgacgcagaacgttaacgttcaggtgttgaccaccttcaattttaactgtaggctgttgctcaatttcaatttcacgggcatgcaaaccatagaaaatttctgggtctacaaaagagtcctctttaaaggttttagagacaataattcgtgcttgaataccatcttcaaaataaatagtacctttatgtgtgccttcaagaatttgatatgctttcatataacctcaattagaaaataaatttatccaagattgttctttaattaaaaatggctcagaatcatatgccattaaactctgtgtgattagtcctttaaaaggcccatcaataaattccatggtaaaatatggaattttattcattagccgtgcattaggagccgtgcacaaaactctgcatcctttgaatacgcctttttgtaatttgtattgcttgggataaaattcgctcaaaatgttattttttgccaaaatttcaaaatgattcaccaatttatttttaatagtttttggcgaaaaataaagatattcgaaaagctgagtgtctgtcatcattgcattccgattacgaaaaactgtggacgagtaataccaccaatgcaacatttaatattacagcagcagtgtacagtgtcaatatggacactataaatcttatccatatcaggagatttgacaggctcatcaattatatacaaaattcgcgaaagcgataaacctctgaacttgcttcctttattaccaataaaactgcgcacagaatcagtaaataaacgaaaacgtatatcatcattagaataacgcgaaaattcctttttaatattatctgcggaaattttagcgtaagctgaagtattagaaagaacaataactgttccaccgtcatacaaccaattagcggcaaaattagttactgcagttgatttaccagattgacgcccaccatctagtcgaagtgtacaatactgtttaagtaagtcttcaaatggcgggatatattcgtttttacaaatttcttctactctagcatcagaatggtgtgtaaaagcattcatcagggatagataaggaccagttaaaaatgttctcattttgttctctctaggtttgggccattccatggcgcatgaattgtccatttctgtatttacccattaccgcacttgggctcgaccttattacaggttggcgggaatccctcacagaatcatgaggtccaggttattcccatgttatttaaatgtaaatatttttgccgtaatacttataccagtgtggcttcattaaaattttttcatcgagtcgttgttgactcaacttaatagctgatttgcatggattataatcatttttccattctactggaatatcgctgatgtcaggaacttcagtatcttttatactgaacccgcgttttaagcattccgttataatgtccgattgacgctttcgcaaaaattctaacttatcgtaaaagaaagtaacatgaccagaacctaaaataaatttagaagatattttaaaatctttaacgcgcttaccgtttgccacatgcttacgaactataccaaaaacacgcggcaattcacggtattctgcgattaaatgttgatcagcaagttcagatactaaagtcaaattaatacgagtcattttatccctccaagtaactgtgaatatactatcacaattctaggagaaagtaaacaactttatagatttttatacgcgtcccaagtgccagttctaaacgttgcaatgactcgttttgcgcgattaggtgtttgattataccatctacttttagctaagttaactgctgcttcatcccagcgtttttgctggagcatgcgtaaagaattagtaaatcctgctacaccggtttcccccatttggaagaccatgttaatcaatgcacagcggcgaacagcatcaagagaatcataaactggttttaatttagcatttctcagaattccgcgaacagcagcatcaacatcctgattaaagagtttttcggcctcatcttttgtaattacaccattacaattacgcccaatagctttatctaattcagatttagcaacacttagtgatggacttttagtaagcaaatgaccgatgccaatagtgtaatagccttctgtgtctttatagattttgagtctaagaccttcatctatacgtaacatttcaaatatattcataatacctcctaagtatttatagaaggtatttataaattaaaagaggctgttcattattcggtaaagtgaaggacccatcacatattgccactgagtacgaggaataagagcaaaagcatccatctctggaatcataacgccatctttattttcaaaataagactcgcaatggcaatttctaaacatctcatgctctactggaatcgtataataaaataactgtaagtctttattactagaatatttaaatacacctaggtcttctagaaggtctggattataattgctaaaaccggtctcttctaagcattctctttttgcagcttccagtgcattcaaatcagaactttctacacgtccctttggaatatcccagcgatgtgccatcattccaggcttacgagaaccagtaacccgacccataaataaatctttatcttctgtcatgaagataataccagctgataatgttttcattttaatttcctgcattcagtgataaagttatttaaattttgagcatatttcttttcatcaaaaatcttttgttgtctgcgtaaacgccatggcatttcaatgaacatacgccatattcctgataatactgctgctgtaaaaatattaacaagtatagttaaaagaacccaatctcctattctgtccattggattttttataaaaaagtaaaatacgaacgatgatataggaagactaatgatataccacagaagaaccttcttatctgtgaaccaatcagcattcgttaacttagcgcgaccgttttgaatacatacgaacttatcatctgttacagtaaatggcttagctgcttgatatcccattctaaactccctaatcaacaaatttttcatatcttcggaacaaccattccagtcaactctatcaactgaaatgccatcatccccatcatctaaatcataccagcgagtttttaaaatcatttaattttcctacaatcactcacaaactctttcattgactcattttcaatataagacatgtagctattatattcttttaattgtattttgtaatctttttttctttgccaatttattttaaaattatcataatgaaaatataaaatgataccaaagaatgaaaacaatgaaataattttagtataacaaagctcactccaaacttctgttatatttactgtgccgtcgatgtttaaaataagacagtcaattaacaatccaaaaagactacctgcaagagctgcagccaacgccacagcaaaaattaaaaatgactcagaaaacgaatatttgactttatttagttttggcttttgcatcgtgattccttaacaaatttcataatttcatcaaattcatacgcagcaagtttaagctgatgttcctttttaatctttttacactgtgctttccaatcacgtacgcgtttacgataatgccttccttgataccagtatcctacccaatttacgggtactaataaaagtggaactattaatggaagaattagcattaacacaagtatttcgccagaatcaatatcagtcataacatctaaaacacctccaataatcaatagaattacaaatgatatgagtataacaggacctattaacacatcagtagaaattatctgacgctttaattcatacttcaacggtttacttggaaggtatagtgatggctttgacatattctctacattccttaacaaatttttctagtaataaatcactttcaaaattgggattttctacaaatttatcaaaaagatcatcaacaatagttaagatattctttttactaagaatacgtttattttcatgcttcgtttcagaatcaactataagagtaaagaaatatttcttgccctgaaattttacagtagtatcaatataaaataaatttgacttttgtaaattacgtttaaaccatgcgtcacttaaactataaacaccgagataatcaaaatcgtcgtttaaataacaaaccgtccattcaggagaaatgaaatcagtaaattcaacatcaaaatcacacgtcaatgaatgaattgattcaatactgttaatgagtattccaggacgtattaaagactttttacctctagaaaatcttccggaaaggctttcatcagtttcatatgaagacccccaatagtaattacgtccttctgccatgcgtttaagagcatttagtaattggtctggaacatcaacctgtctttggaactcttcaaacattgaattgaaatcactttgcattttcattttcattcctatttactccaagtataaggggccgaagccccttatcattatttcagagaattaatgtattcctgaacatcggcagaggtagtttcaaccccagaaatattaccgttaaaggtttcaactcgagcaagggtatcttcaatatcaaccttagtcagtgctgcaatttcaactacatcatcagcagtactaattccaagggcattcgctgcacgagtttcacggatatattccaatttaaccgcaagttcttgacgagcatcatctaactcaactactttcttggcgatttcaattcgcatttcagcataaccgtcagccttagtagtcaactgctcagctgttcgacgatatagtaaaccgagtttagcatgcattgttacatcttggccttcggaaagaagtttacgaatttcacgctcttttgattcggcctgtcgattcttttcgataacaagttcacgaatacgtttttcttcgttaatagatttaacagaagcagtttttagatctttaattttatcaagtagttttgctgctgcagcagtatactgttcttcgacagatagatttttagccatagcagaaccaagtttagtgcgaataaactcaacaattttcttcagtgtgttcatagtatttccttaggttaattgagatttaaaatccatgagagtattatactccggatagtttgtaaactatttcaacatcgccttttgctgctttataaccttcagcccaagatacaaccgagtttttatccgaagattcaaattctggcattgggctttcgccaatgttcacgcagtatgtttcttcattttcgtcgaaccaaataattaaagtagtcatttatttctccgttttctgtatttgttttgataagtctataataacaccgtccttggcgtttgtacacaattatttcatattattgaaatattcttctgcgatttcatcgttatcatggtaaactttagaagacagtttaacataaccttcagcagtgaacatgttaatcacaacctttacagtataccactgaccatcttcattacccattactgcataggtttcaaacatcggatggtcaggaccgataactttaatatcattcactgtacgaccgaaatcttctgaaacacatttcataaagaagttgaacagttcgccgtaattatccatttcattctccaagttgtttttgtatcagtagttgatagttgtatagtaccatggaagaacagggatgtaaacagttttgtgaaaaaattttttaaaaagttttagggaattctagggcagggaggggcaattaaaagataggataatatattataaagggtagaaactaaatgatgtctagagaggcccggaaaggcctagataccaaaaagccccaaccttttggtcggggctaagaatgttatttgatttgtttagcagaccaaatgcggtctttaataattttttggatgtcttcaacatactcaagagagtgaacatgtgggttatctttgaaactataagcacgagctagcttttggccttcagttttgattactaaaagctctttaaggatagcttcatatttggagataattcctttaacaatatttttctcttgtgtgactttaggatctgctttaggagcaggtttacctgaagcctttgcaaaagcagctccagtagcaactaaacttttccaagccatactaactgcattccctgtaaatccttcggctttcatatcacgagcaaattggaatcgtgattcatcggaagcatctttataggaatatttacccgcggcaatggcagcttttgcaacagcttgaatttcagtgctagatgcttcatttaacaccgcttcatttaaaaattgagtatatgatttcatcttatttcctgttttaatttgtagatttaatatactaatatttataccaaaaagccccaacctttcggtcggggctaagccttgcggcaaccttgtcggggttccacctgctaaggcaagtgtttgtacgaaacgccgggattcgaacccggttattaagtagttgacgctactcaatatttttaaaaggccatatctcgaccatatccgaacgttccgtcaaaaacgctactcggcttacggcaaagatatttcctcgaatcgataattcggtgcgccgtttctgctgtgatagtaaagagccagaacacagtaaaactgtgggaggaaactatactccagggaacatcagtccgacgacttaccggtagcgacccggtttcttaatattcttttaaagaatcaatatattcacggcgtttacgccacaaatcaattgcttcatacgcggattcagcatttcgaattagccggcatttatgtaaagacttatgattttgatattgtgtagataacggaattgtatctaaaaggtctttacgatcaaaatattcgtaaccatctaaaccaaatgaacgatttttgagaaattgccaatgaccatattcgttttcgacataaacataatctgcatgctgataaagcaaattaattacacgttcagaaataacagtatcattatgattaaaatagaatgttaaatcatgaactactaaataaacattacctttcatattttcctcacttataattggtcgaggcagtagggatcgaacctacgacctaggacttagaaggtccttgctcttccttctgagctatgccccgtaattggggtgaccgatgggagtcgaacccatgactacgagaatcacaatctcgagttctaccaactgaactacggccacattaatacctactccaacaatcaagatgtcttcacacgaaattaagagaagagtgatcagttcaacccctataatcgcgtcaagtagatattaatgtgacagttgtcacaaatttggcggacgtgataggattcgaacctataaccaatcgcttaacaggcgatcgctctgccattgagctacacatccaaattggtggggagtggtggagtcgaaccacccgagtcgcaatgacaatgaatttacagtccacaccgctacctctacgggataactccccaaattaatttggtggccctgggtggaattgaaccaccatctggcgattatgagtcgcttgcttgaaccttccagctacagggccttggtgctgattgacggaatcgaaccgccgaccttctcattacaagtgagttgctctacctactgagctaaatcagcaaaactggcggaggcgataggatttgaacctatgagtcgccggagcgactgccggttttcaagaccggtgcattaaaccactctgccacgcctccagtctccgtggcaggatttgaacctacgacattctgctcccaaagcagacgctctaccaaactgagctacacggagtaaattaaattggagcggataatgagaatcgaactcacatcatcagattggaagtctgaggtaataccattatacgatatccgcaaatttggtgcgagaagtgggactcgaacccacaaggaaatcattccgcagcattttaagtgctgtgcctttaccaatttggccattctcgcgctgggaataaaggactcgaacctttgcatcctggaatcaaaatccagtgccttaccaacttggctaattcccaattattaacaaaggctcttaagcaagaacccttgatgatagagggtattaatcagtgcgatatgagttaataataacaaataattcttaaagcatatttaccatttataataatacatatttacgatgcattcaagacccaaaggattcttgaaaatatcatattcaagaggacctttttctgtttcaataaagaaatcaaaatttactgtattaaatttacgttcttccttcactaatttaacttgagaagatgaacggtcaatgtaaaccttttcaacttcaaaacatgttaaaatgccataatcatcaatcaaagctttagccgcgtcttgatcatatttatatccattttcaatggatgatactttcgcataaagaatcattatcagccttcatcaacaatagtgtgagtattagcatttacgatttgccaccaatcaaagcgattagaatccatcggtttgttttcattttctttgataatgtcacggagttcatcttcagagaatgctttagcaattaaatcggtatacccaccacggggataataattatcacctgcaaacaaaaggaaatttaccttcccggaagcaacatatgcttccttaggatacttgtttcctgcgtggtcaaccacttcaatataacggtaaggaatatcggttctttcaacccattgccatgccgccgcaggggaatcgaaagcatctacacctaaacgattatcttcatctttagacggattattttcgtaatccgcatatacataatattcaacgttcattattcacctttagaaattttatccataacaatagcaattaaaccaattaaaaatgctactacaagtgaaaacacattttctgctgtagtcaataatccacatataaatccaacaaacattgaaaaactaaaagcggaagcagaaattgcaatagcaacatttcgaattaattcacaacgtttcattttattctcctcagtagtagatagggtaatagtatcactaccctatctaaaagtaaacttattttttacgaaaaattgatttattttctgctgcccatttttcaataactgcagcaggaccagtaacaacaattttatcaccgtaatcttctgcggcgagttgaccgaaattatctaatgcatcacgaagaactccatgaggcatttcacccattttatctttcttgccagtgtaaataaactcaacttttacatcagcagtttcagcaataaattcttggtaagttttcattttgatttccatttggttttgttttgatagggtaatagtatcacaactaaaaccctatgtaaacaactttgtgaaattattttaaatcttctaatcgtttcttcatcttagaaccatttttagcaatttctcctgcatcggagcataatgctaaaagtgctttaactttagtttggtctcctttaaaagatgaaggatcgaccgcagcagcaagttctttaatacgagagaaaagacgctcagcttcagctaaagccattccaagctttacttccataccgtgggaagattcagtgatagtagtttttgtagcaaactctttgaaagttttcatttttattttcctaattaattttgatgaggtaatagtatcactacctcatcagtatgtaaacaactttgtgaaattattttaaatcatctgcccaatcgagtttaagaggctctttgtattcacggtcaagtacaaccggaatttgtacatcaccgctaaatgataagggcccaacattataagacaatgttatatgcggtgtgtaatcatcaaaatcgtgtgtagcacctagtgcccgcgcatacatgtgtcgacagcgcagatattcagaatctagcacaagtacaagagtcgatccatcttgtgttttccacacttctaaatgtccagaagaagctacttcaaaacttccactcgatggaacatatggaacatttactcttgaataacatatagtcgaatgaattttttctctaggaactggattaggaacacgtaaagagcgctggagttcttccagcgcgtcaagtgttaattctgaaaacttagctgctacataaagacccgttgaaaagtctttaaattccatcattcttcatctgcagattcagcagtaagattcttgacagcttcaacgatttcttcaactttaatagtatcgccagtgatacctactgcatgagcaatttcagccaaagttccttgcagaattttggattcttccatcagacgagccgcttggtcctgcgtatcaagaatacgagatttcagagttacgatttcagcagacagtttttgttcaatagtttgttcagacattatagtacctttagtgtatttttaattttagaaaaaagttcttcaagagaaccatcgtttgtaattactaaatcgccatcacgaattggcaatccagcttctgtaatatgtgtatcattggatttttgaccaggacgaactacatgaattactgtagcacccatcgccctagccgcatccatttcatgatcttgacgggtatcaggaacgatataataatcataacctgagttaaatttatcaagataatctaaagcaaataattttacccagtacatgcggtcgaagttattaacaatcaaatccgtacctagggcttgcatcagacgacggactgaccattgatcttcaatattatttataacgtcaataatcttgttaaatgctacggaattaactgattcttgtccttcgtcatcaaaaacaaacacacctttaattgggcttttaccattaagatagcaaaatgcttgttccataatcgtgattacttctaatttagttagatttaaattagtctcacgatcatagtcaattccttcaaactctttacgagttaagcaaggatagtcggtatttgctgcaaatactccccatgcataagccaatgcatccttaataggaccagcaagttggtatttaactgcagaataattgctcatgataaaatcagcagtagtatcttttccactacgctttacaccgcttaaaaagattagtttcatatgtttctcctcaaatttagttaagattataacacatgaaactgaagcattaaacttccgctataatttttccatctttttctacttgaaaatacgtataaggaatcgttgctgtacatactaaagccgggtctgaatcttctgtgtagctaaattctacttcagataggtcagaaacccaaggcttataaaaatttattgacatcacgatttcagttttgctattatctaaaatgtaaagcgtaatgtattcaggacctgttttttgggcagtattttcacctgtaagatagttgctagttcctagcatccattcatacattcctatccatgacttaagttcttcatcaactataaatctcacgatgagtggatcgtactcaaatgtagcacctggacgttgtgctcggcccagtccaaacggcccagtcacggtatcagtaacaggtattctaattcctggaataggaactgactgagcatttaaagtaaaagcagatgtagtattactatgtggtattgatactacaaagttagttgtatttgcttggttaaaaatttgttgcagtgcttgcgacatatattcctcataatgctttataactgttggtggtataatgggtctaagtcccttccattcaattccatttagaacaaacaacagaaaagaatggaagataatagaattagatatttgaccagactttgtttgcagagaaacgttttccttttgaaacgaactgctgaagtggcattaacacaacgttcgcccagtctttcggggcgatttcaacaaggctacccataatattaccaggtatatatgccttaatcatttggtctgcacccctaaatcctttcacttgactccaatcaatttttaatttcgttttattagtaatagtaggtgtatttgcatattgctttaaaagctcttctagaaactgttgacgagctttaggtggaatatagtgcaagttcaatccgtacattaaattatgcttacctaaaccaaggtaaattatcaaaggaaatttatcccagtaaggaagagtttccttgtgtttagcatcataagcaaaagcatatattcgtcccggctgcgggcgaacaactttatgtccttttacttgcttaatagtttcagcaaaccactttctggttttattattaattgctgcgccttcattacgaattttatcgcgcaatgtttgtctgaatgaatttatcataagcagttgtctttcttgcttattgagtttattcattggttttgattcaagcttttgaatcttttcagccgttttaattcctgaagcatattttgacattgctgaagtaaacgtagagtatttgattcctctttcttcagcaaattgctttcctgtcattccttttgctttggcctttttatattcaagacctatctgaatccatttcttttcgtttaatgattgcttaacctttggaacttggggagtgctttcattaattatttgaaaaatagccattatgcccccttaaagccaagagctcgtaatccatcttctgtcagaattctaaattttattccacgcttttcagctaaagcttgcgctgctttccatttgtcggtattaacagaatatgtataaatttcattcataaatcttttcttcgctgcggttgttagatgtgctggtttaactggtggttgtgtttcttttttaggttttatttcaataaaaaattcttgtccagaagaatctttcatccaaatatccatgaagtatctacgttttttcccttctgcattacaaaaataaggaattactgctgtttcactaccccatgcaataatttctggatttttatctaaccattcaaaaaagaatttttcccaatttgatctatacgtaatttttttagggtcacctctatactttgatatatttttaggaacccattttccagaatatgccattggattctccttataaatagataatatatttataaacaggagggcccatgctctttacattttttgatccgattgaatatgcggccaaaacggtgaataaaaacgcgccgactattcctatgacagatatttttagaaactataaagactattttaaacgcgctcttgcgggataccgcttacgtacttattatatcaaaggttcaccacgcccggaagaattagcaaatactatatatggaaatccacagttgtattgggttttattgatgtgtaatgataattatgacccgtattatggatggattacttcacaagaagcagcttatcaagcatctatacaaaaatacaaaaatgtaggtggagaccaaatagtatatcatgtgaatgagaacggtgaaaaattttataatttaatatcatacgatgataatccatatgtttggtatgataaaggtgataaagctagaaaatatcctcaatatgaaggagcacttgctgctgttaatacgtatgaagatgctgttcttgaaaatgaaaaacttcgtcaaataaaaataatagcaaaatcagacattaattcatttatgaacgaccttatacgtataatggagaaatcttatggaaatgataagtaataaccttaattggtttgttggtgttgttgaagatagaatggacccattaaaattaggtcgtgttcgtgttcgtgtggttggtctgcatccacctcaaagagcacaaggcgatgtaatgggtattccaactgaaaaattaccatggatgtcagttattcaacctataacttctgcagcaatgtctggaattggaggttctgttactggaccggtagaaggaactagagtttatggtcattttttagacaaatggaaaactaacggaattgtccttggcacgtatggtggaatagttcgcgaaaaaccgaatagacttgaaggattttctgacccaactgggcaatatcctagacgtttaggaaatgatactaatgtattaaaccaaggcggagaagtaggatatgattcgtcttctaacattatccaagatagtaacttagacactgcaataaatcccgatgatagaccactatcagagattccaaccgatgataatccaaatatgtcaatggctgaaatgcttcgccgtgatgaaggattaagattaaaagtttattgggataccgaaggatatccgacaattggtattggtcatcttatcatgaagcagccagttcgtgatatggctcaaattaataaagttttatcaaaacaagttggtcgtgaaattactggaaacccaggttctattacgatggaagaggcgacgactttatttgaacgtgatttggctgatatgcaacgggacattaaatcacattctaaagtaggaccagtctggcaagctgtcaaccgttctcgtcaaatggcgttagaaaatatggcatttcagatgggtgttggtggtgtagctaaatttaacacaatgttaactgctatgttagcaggagattgggaaaaagcatataaagccggtcgtgattcattgtggtatcaacaaacaaaaggccgtgcatcccgtgttaccatgattattcttacggggaatttggaatcatatggtgttgaagtgaaaaccccatctaggtctctatcagcaatggctgctactgtagctaaatcttctgacccggctgaccctcctattccaaatgactcgagaattttattcaaagaaccagtttcttcatataaaggtgaatatccttatgtgcatacaatggaaactgaaagcggacatattcaggaatttgatgatactcctgggcaagaacgatacagattagttcatccgactggaacttatgaagaagtatcaccgtcaggaagaagaacaagaaaaactgtcgataatttgtatgatataaccaacgctgatggtaattttttggtagccggtgataaaaagactaacgtcggtggatcagaaatttattacaacatggataatcgtcttcaccaaatagatggaagcaatacaatatttgtacgtggcgatgaaactaagacagttgaaggcaatggaactatcctagttaaaggtaatgttactattgtagttgaaggtaatgctgacattacagttaaaggagatgctaccactttagttgaaggaaatcaaactaacacagtaaatggaaatctttcttggaaagttgctgggacagttgattgggacgttggtggtgattggacagaaaaaatggcatctatgagttctatttcatctggtcaatacacaattgatggatcgaggattgacattggctaatatacttccaatgagcgctgatttaggagaatccatggaaggttcttctatcgacgtcacctttaccgctcaattagaaacaggtgaaacgttagtatctataaatataactagttacgaagaaactcctggggttttagtagaagaaaatcgcttatacggaacatatgaatctgtgtttggatttggaaatgacgcgttgaaatatcgtttaggcgatgaatttaaaactgctgcttcatgggaagaacttcctactgattctgatactcagttgtatttatggaaagctcctcaaaacctccagaagacattcacttacgaagtaacattaatatatgactaccaagaacaaagtgaatctggaggttctggcagtaattctaggtcatcttctgatactactgaaccgacagatcctcctgctccagtaagaaaaactctcgttaaaaattatactaaaactatagttggaaattggagtcgttgggctaataaattaagaagctatgtgtatgagaggtcatagatgtcaggattaagttatgataagtgtgttactgccggccatgaagcatggcctccaacagttgtgaatgctacacaaagtaaagtattcactggaggaattgctgttctcgtagcaggtgatccaattacagaacatacagaaattaaaaagccatatgaaacacatggcggagtgacacaacccagaacttctaaggtatatgtcactggaaagaaagctgttcaaatggctgatccaatatcatgcggtgatactgtggctcaggcatcatctaaagtattcattaaataggatttaaaatggcaaatacccctgtaaattatcaattaacaagaacagcaaatgctattcccgagatattcgtcgggggtacgtttgctgaaataaaacaaaacctcattgaatggcttaatggccaaaatgaatttttggattatgattttgaaggctcaagattaaacgttctgtgtgaccttttagcttataatacattgtacattcaacagtttggtaatgctgctgtgtatgaaagctttatgcgtactgctaacttacgaagttcagttgttcaagctgcacaagataacggatatttacctacttcaaaatccgctgcgcagaccgaaattatgttaacatgcaccgacgcattgaataggaattacattactattcctcgcggaactcgctttttagcatatgcaaaagatacttctgttaatccatataacttcgtttctaccgaagacgttattgctattcgtgataaaaataaccaatattttccgcgtttaaaattggcccagggacgtatagtaagaactgaaatcatttatgataaattaacacctattatcatttatgataaaaatattgatagaaaccaggttaaattatacgttgatggagcagaatggattaactggacaagaaagtcaatggttcatgctggttctacatcgacaatttactacatgcgtgaaactattgatggaaatactgaattctattttggtgaaggtgaaatttctgttaatgcttctgaaggagctttgaccgctaattatatcggaggtcttaaacctactcagaactctacgattgttattgagtacatcagtactaatggtgctgacgcgaacggagcagtcggattttcatacgcagatacattaacaaatataactgtcatcaatattaatgaaaatccaaacgatgacccagattttgttggggcagatggcggcggtgatccagaagatattgagcgtatccgcgaattgggtactattaaacgcgaaacccagcaacgctgcgtaactgcgactgactatgatacattcgtttcagagagatttggttctattattcaagcagttcagactttcactgattctactaaacctggttatgcatttattgctgctaaacctaaatcaggtctgtatttaactactgtacagcgtgaagatattaaaaattatctcaaagactataatttagctcctattacgccatcaattatttctcctaattatctttttattaagactaatttaaaagtcacatatgctttaaataagctgcaagaatccgaacagtggctcgaaggtcaaataattgataaaattgatcgttattataccgaagacgtagaaatttttaattcatctttcgctaaatctaagatgttgacatatgtagatgatgcagatcattctatcattggctcatcagcgacaattcaaattgttcgtgaagtacaaaacttctataaaacgcctgaagcaggtattaaatacaataatcaaataaaagatcgttctatggaatctaatacgttttcatttaattctggacgaaaggttgtaaatcctgatactggtttagaagaagatgtattatatgacgttcgcatagtatcaacagaccgagattctaaaggaattggtaaagttattattggtccatttgcttctggcgatgttacagaaaatgaaaacattcagccatatacaggcaacgattttaacaaattagcaaattctgatggacgcgacaaatactatgttatcggtgaaataaattatccagctgatgtgatttattggaatatcgctaaaattaatttaacatctgaaaaatttgaagttcagaccatcgaattatattctgacccaaccgatgatgttatctttactcgcgacggttcactgattgtatttgaaaatgacttacgtccacaatacttaactatcgatttggagcctatatcacaatgacagtaaaagcaccttcagtcactagtctcagaatttccaagttatccgcaaatcaggtgcaagtacgctgggatgacgttggtgctaatttctactattttgtagaaatcgctgagacaaaaacgaactcgggggaaaatctcccgagtaatcaatacagatggattaacttaggatatactgcaaataacagcttcttttttgatgatgctgacccattgacatcatacattatcagagtagctacagctgcgcaagattttgagcagtctgattggatttataccgaagagtttgaaacttttgctacaaatgcttatacatttcaaaacatgattgaaatgcaattagccaataaattcattcaggaaaaatttactcttaataattctgattatgttaattttaacaatgacactataatggctgcattgatgaatgaatcatttcaattcagcccatcgtatgttgatgtttcatcaataagtaattttattattggtgaaaatgagtatcatgaaatacaaggttctattcagcaagtatgtaaggatattaaccgagtttatttgatggaatcagaaggaattctatatctttttgagcgctatcaacctgtagttaaagtatccaatgataaaggacaaacctggaaagccgtaaagctattcaatgaccgtgtaggatatcctttatctaagacagtatattaccaatctgcgaacacaacatacgttctaggatacgacaagattttctatggccgtaaatcgactgacgttagatggtcagcagatgatgtcagattcagttcgcaggatataacatttgctaaacttggcgaccagttacatttaggatttgatgtagaaatctttggtacttatgcgactttaccagcgaatgtatatcgtatagctgaagccattacttgtacggatgattatatctatgttgttgccagagataaagttagatatataaaaacgagcaatgcacctatagattctgatccattatctccaacatattcggaaaggctatttgaacctgatacaatgactataactggaaatcctaaagcagtatgctataaaatggattctattggtgataaagtttttgctcttattatcggtgaagttgaaacattaaatgctaatcctagaacgtcaaaaataattgattctactgataaaggaatatatgttttaaatcatgacacaaaaacgtggaaaagagtttttggcaacactgaagaagaaagaagacgtattcaacctgggtatgcgaatatgtcaactgatggtaaattagtttctctatcttcgagtaattttaaatttttaaatgataacgttgttaatgaccctgaaactgtagcaaaatatcagttaatcggtgccgttaaatatgaatttcctcgtgaatggttagctgataagcattatcatatgatggcatttatagcagatgaaaagtctgattgggaaacttttacgcctcagccaatgaaatactatgcagaaccattctttaactggtctaaaaagtctaatacacggtgctggataaacaactctaatagagctgtagtagtttatgctgatttaaaatacactaaagttatagaaaatattccggaaacatcaccagatagattagttcatgaatactgggatgatggtgattgtacgatagtaatgccaaatgttaaattcacgggatttaaaaaatatgcgtctgggatgcttttttataaatcttctggtgaaataatttcttattatgattttaactatcgtgtgagagatacagtagaaattatttggaagccgactggagtatttttaaaagcatttttacaaaaccaagagcatgagactccttggtcgccagaagaagagcatggattagctgaccctgatttaagaccattaattggcacaatgatgcctgattcttatttgttgcaggattcgaattttgaggcattttgtgaagcatatattcaatatctttctgacggatacggaactcagtataataatttacgaaatttaattcgtaatcagtatccacgagaagagcatgcgtgggaatatttgtggtcagagatatataaaagaaacatttatttaaatgctgacaaacgtgatgctgttgcaagattttttgaatcacgtagttatgatttttattctactaaaggaattgaagcatcatacaaatttctttttaaagttctttataatgaagaagttgaaattgaaattgaatctggggctggtactgaatatgatataatcgttcaatctgattctttgactgaggatttagtaggacaaacgatttatacagctacaggaagatgtaatgttacttatatagaaagaagttattctaatggtaaattgcaatggaccgtgactatacataatcttttggggcgtttaatagcagggcaagaagttaaagcagaaagacttcctagttttgaaggcgaaattattcgtggggttaaaggaaaggatttgcttcaaaataatatagactatattaatagaagtcgatcatattatgtaatgaaaattaaatccaatttaccttcttctcgttggaaatctgacgttattcgttttgttcatccagtaggatttggatttatagcaatcacgcttttaactatgtttattaatgtcggtttaactcttaaacacacagagacaataattaataaatataaaaactacaaatgggattctggattgcctactgaatatgctgatagagtagctaaattaactccaactggcgaaattgaacatgattcagtaacaggagaagcaatttatgaacctggcccaatggctggtgtaaaatatcctcttcctgatgactataatgctgaaaataataattcaatatttcaaggtcaattgccttctgaacgacgcaagttaatgagtcctctatttgacgcatctggaacaacatttgcacagtttagggatttagttaataaacgtctaaaagataatataggaaatccaagagaccctgaaaatccaacacaggttaaaatagatgaatgattcaagtgttatctatcgtgcgatagttacttcaaaatttagaacagaaaaaatgttgaatttttataattcaattgggagtggtccggataaaaacactatctttatcacatttggaagatcagaaccgtggtcatcaaatgaaaatgaggtgggctttgccccaccttatccaaccgattctgtattaggcgtaactgacatgtggacgcatatgatgggaacagtaaaagttcttccatcaatgcttgatgctgttattcctcgcagagattggggagatactagatatccggatccatacacatttagaattaacgatattgtagtgtgtaactcagctccttacaacgctactgaatcaggcgcaggctggttagtatatcgttgtttagatgttcctgataccggaatgtgttcaatagcatctttaactaataaggatgaatgcctcaaattaggcggaaaatggactccttctgttaggtcaatgactcctcctgaaggtcgaggagatgcggaaggaacaatcgaacctggagacggatatgtttgggaatatctttttgagattccgcccgatgtatctataaatagatgcacaaatgaatatatcgtagttccttggcctgaggaattaaaagaagacccaactagatgggggtatgaagataatctcacttggcaacaagatgattttggattaatttaccgggttaaggcaaatactatccgttttaaagcatatttagattcagtttactttcctgatgctgcattgccaggaaataaaggatttagacaaatatcaataatcacaaatcctcttgaagctaaagctcatccaaatgacccaaatgttaaagctgaaaaggattattatgatccagaagatttaatgaggcattcgggcgaaatgatttatatggaaaataggccacctattatcatggcaatggatcagacagaagaaatcaatattctgtttacattttaaattaagggagcccatgggctccctttttctttataaatactataaactcataaggaaaccgctatgttcattcaagaaccaaagaaattgattgataccggcgaaattggtaacgcttctactggtgatatcttattcgacggtggtaataaaattaatagtgattttaacgcaatttataatgcgtttggcgatcagcgtaaaatggcagtagcaaatggcactggagcagatggtcaaattatccatgctactggatattatcaaaagcactctatcgcggagtacgcaactccagtgaaagttggcactagacatgatattgatacctctactgtaggtgttaaagttattattgaaagaggagaacttggcgattgtgttgaattcattaactctaatggatcaatatcagttactaatcctttaacgattcaggctattgattcaattaaaggcgtttcaggtaatttagtagtaactagtccatatagtaaagttactttacgttgtatttcatctgataattctacgtcggtttggaattattctattgaaagtatgtttggtcaaaaggaatcacctgctgaaggtacatggaatatttctacatctgggtcagttgacattccattgtttcatcgtactgaatataacatggctaaattgttagttacatgccaatcagtagatggaagaaaaattaaaacggcagaaataaatattcttgtagatactgttaattcagcggtcatttcttctgaatatgctgtcatgcgggttggaaatgaaacagaagaagacgaaatcgctaatattgcatttagtattaaagaaaattatgtaacggcaactataagttcttcaactgtcggtatgagagcagcagttaaagttatcgctacgcagaaaatcggggtggctcaataatgaaacaaaatattaatatcggtaatgttgttgatgatggtaccggtgactacctgcgtaaaggtggtataaaaataaatgaaaactttgatgaactttattatgaacttggcgatggagatgttccatattcagccggtgcctggaaaacttataatgcttcatccggtcaaacattaaaagctaagtggggaaaatcatacgctattaatacctcttctggaagagtaactttacaacttcctaaaggaactgttaatgattataataaagtaattagagctagggatgtatttgcaacatggaacattaatccagttactttagtagctgcttctggggatacaattaaagggtcgtcatcgtcagttgaaattaatattcaatttagtgatttagagctcgtttattgtgctccaggacgttgggaatatgtcaaaaacaaacaaattgacaaaattattagttcagatattagtaatgtagcacgtaaagaatttttagtcgaagttcaaggacaaacagactttttagatgttttccgcggaactagctataatgttaataacatccgagtaaaacaccgtggtaatgaattatattacggcgatgtatttagtgaaaacagtgactttggctctcctggggaaaatgaaggagaattgattcctcttgatggatttaatattaggttaagacagccttgtaatattggtgacactgttcaaattgaaacatttatggatggtatatcacaatggagaagttcatatacaagacgccaaataaaagtattagattcaaaattaacgtcaaaaacttctttagaaggaagtatttacgttactgatttatcaacaatgaaatcaattccattctctgcatttggattaattcctggagaacctattaatcctaattctcttgaagttcgttttaatggaattttacaacaacaagctggaacagcaggatatcctctgtttttgtgtgaaggtgctaactcagatacgcaagcaggatgtatatctcttggtggtgaatggaaagaatctaacacagattattctatagaatatgaagatggaaaacctgtcagtcttttatttgatagaaaatttgaatcaggtgatataatcgttataacatggtttaataatgatttaggaactcttttagaaaaagatgacattattgaattaactgatgaccgttatgttagtaaaggatcatctactgaagttactggggatgtagccttaacagattttgataaaatcggttggccaaatgttgaaaaagttgattcttatactagaacgtataattcaatatcatctattttcgatagcatttatcccgtaggttcaatttatgaaaatgctataaacccaaataatccggtgacttatatggggtttggttcgtggaaattatttggtaaaggacaagttttagtaggatggaatgatgatgttacagatccaaactttgcattaaacaataatgatttagattctagcggaaatccttcacacactgccggtggaacagttggaacaacgtcagtaacgcttgaaaatgcaaatcttcctgcgactaaaactgatgaaaaagttttaattgaagatgaaaacggatcagttattattggaggttgtcaatatgacccagacgaaactggtcctatatatacaaaatatcgtgaagactacgcaacaacaaactcttcacatactcctcctactaatattagtaatattcaaccgtctattactgtataccgttggataaggattgcataatgagtttacttaataataaagcgggagttatttcccgcttagcagattttcttggttttagaactaagaaaaatgatatttcggttatgaataatcagccagtaggcgctgtaacaatttcacaaatatcaaaaggtttttatgattcaaatgtagaatctgctatcaatgacgttagaaatatggcagagcaaccggttggagctgtattagttaatataagcggcgtatctcctactggcgtgcaacaaaccgactattggtcatttgaaggaactgttactgatacttcagtcaaatcaggtgacccagttattgttaacatgtttggtattccagttaaagctactaatggaatgacttcaattgaatttactagtgccgttagaatagctctacaggaaatggttgtaaaatttattgcaattgattcatttgaagaccatcctaccataggaaataaaatacaagttaagtatttagataaccaagaacatatcttagaacaatactctgataaaggaattactttcaaacaggaaataatttctccttctaaacctgggtatggaacttggcaattattaggtgcgcaaactgttacgctagatagtcacacacaacctacagtattttattattttgagagagtagcatgagtaacaatacatatcagcacgtatcaaatgaatcaaaatatgttaaattcgatccagtaggatcgaattttcctggcactgttacgacagtacagtctgcattatcaaaaataagtaatatcggcgtaaatggtattcctgatgcaactatggaagttaaaggaatagcaatgattgcgtcagagcaagaggttttagatggaactaataattctaaaatcgttacaccagctacattagcaacaagattattgtatccaaatgctactgaaactaaatatggtttaacgcgttattcaacaaatgaagaaacattaaaaggctcagataataattcatcaataacaccacaaaaactgaaataccacactgacgatgtgttcaaaaatagatattcgtctgagtcatcaaacggggttattaaaatatcatctacacctgcagctttggctggagttgatgatactactgcgatgactccgctaaaaacccaaaaacttgcaataaaattaatttcgcaaatagctccttcagaagacactgcaacagaatcggtgagaggagtagttcaattatctactgttgcacaaattcgtcaaggaactctccgcgaaggatatgcaatttccccgtatacctttatgaattctgttgcaacacatgaatataagggtgttatacgcctaggaacgcagactgaaattaataataatttgggtggtgttgcagtaacaggtgaaacactaaatggtcgaggagctaccggttctatgcgtggagtagttaaattaacgacgcaagccggtattgcccctgaaggtgatagctctggagcattagcatggaacgcagatgtaattaatactcgtggtggacaaactattaatggttctttaaatttagaccatcttacagcaaatggaatttggtcacgcggtggaatgtggaaaaatggcgatcaacctgttgccactgaaagatatgcgtccgaacgagttccggttggaactattatgatgtttgcgggtgattcagcacctccaggttggattatgtgtcatggtggaaccgtgtcaggtgaccaatttcctgattatagaaacgtagttggaacaagatttggtggcgattggaataatcctggcgttcctgatatgcggggtcttttcgtcagaggagccggcacaggcggtcatattttaaatcaacgtggacaagatggctatggaaaggatagactgggcgtaggatgtgacggaatgcatgttggtggtgttcaggcacaacaaatgtcataccataaacatgctggtggttggggtgaatataacagaagtgaaggcccatttggcgcgtcagtttatcaaggatatcttggaactagaaaatattccgactgggataatgcttcatacttcactaatgatggatttgaattaggtggaccgagagatgctcatggtacacttaatcgtgaaggattaattggttatgaaactagaccatggaatatatcattaaactatattattaaagttcattactaaggattacaaatgattgaattaaaagagttaccttttgttgatagcgttcctgacgaaggtcaggaacgtatttcatggattaaaaatggtgaagaaatattaggagctagtactaagtatggaaatgatggatcaatgaatagaccaattgtttccgtgtttaaaaacgtcgaagttcttgatgaaaatgtgggaattcttaaaactgccattgaaacatcacagaaagatattaaaacaattcaaggagttttagatgtatcaggagatatagaagcactatcgcagatcagtgttaataaaaatgacatatcgaatttaaagacacttaccagtgaacacactgatatattaactggaactaatactacagttgacaaaattattgctgatataggtccatttaatgatgaagaaaactctgtttatagaacaattagaaatgatttattgtggattaaacaggaattaggacaatattctggccaagacattaacggtcttcctgttgttggtaatgctagcacaggaatgaaacacagaataataacaaatagtacattattatcttcacagggcattcgtttaagcgaattagaaaataaatttactgaatctgacgtaggatcattaactgttgaagttggtaaattacgtgatgaacttggtaataaaccagtagattttgggccaaatatttataatagattaaacactatagatgataaacaaactttaataaattctgatatagcagaaattaaatcttctattggatacccagaaaatgtttctataataacagaaattaataataacaaaagtagcattgaagctattaataatgaattaaatcagagtgaaggtgttaaacaacgcttaacggctattgaaacttctataggttcagatgatattccttctagcattaaaggaaaaattaaaaatcacacaacttctattgagtctttaaacggaattgttggtgaaaacacttcgtctggtttaagagcgaatgtttcgtggttaaatcaaattgttggaactgactccagcggaggacaaccgtctccttctggatctctattaaataaagtttcagtgcttgaaggagaagtttcagttttaaacaataatgttcaaaatatacaagttgaaataggaaataatagaacaggaattaaaggtcaagttattgaacttacttcacttataaatggaaataatcctgacggatcaactgttgaagaacgaggattaactaattctgtaaaaacgaatgaaaccaacattgcggcagtcacacatgaagtaaatacagctaaagacaatatatcctctttacagagcagcgttcaagctctacaagaagcaggttatattcctgaagctccaaaagatggccaagcttacgttcgtaaagacggcgaatgggtactactttctacctttttatcaccagcataacatggggccgcaaggccccaaaggattttaaatgtcaggatataattctcagaatccaaaggaactcaaagatgtcattctaagacgtttaggggctccaattatcaatgttgagttaacacccgatcaaatttatgattgcatccagcgtgccctagaattatacggtgaataccattttgatggacttaacaaaggttttcatgtattttatgtaggagatgacgaagaaaaatataaaaccggagtcttcgatttaagaggttcaaatgtattcgcagtaactcgcattttgcgaacaaatattggatcaataacgtcaatggacggaaacgctacatatccatggtttactgattttcttttaggaatggctggtattaatggcggtatggggacttcttgtaatagattttatggaccaaatgcctttggagctgatttaggatattttacccagcttaccagttacatgggaatgatgcaagatatgctctctcctattccagacttttggtttaattcagcaaatgaacagctcaaagtcatgggaaacttccaaaaatatgatttaattatcgtagaaagctggactaaatcatacattgatacaaacaaaatggttggaaatacagtaggatatggaacagtcggtccacaagatagttggtcattatctgaacgatacaataatccagaccataatttagtaggtcgtgttgtcggtcaagatccaaatgttaagcaaggtgcttataataatcgttgggtgaaagactatgcaacagctttagctaaagaattgaatggtcaaattttagcgcgtcaccagggaatgatgcttccaggcggtgttacgattgatggacaacgtttaatagaagaagctcgtttagaaaaagaagcactacgcgaagaattatacttgcttgaccctccatttggaatttttgtaggttaatatggctacttatgataaaaatctttttgctaaattggaaaaccgcacaggttattctcagaccaatgaaactgaaatattaaatccttatgtaaatttcaatcattataaaaacagccaaatattagctgatgtattagtagctgaaagcattcaaatgcgaggtgtagaatgctattatgttccaagagagtatgtttcccctgatttggtattcggcgaagacttaaaaaataaatttactaaagcttggaaatttgctgcatatttaaattcatttgaaggatatgaaggagctaaatcgttctttggtaactttggtatgcaagtacaagacgaagtgactttatctattaacccaaatttatttaagcatcaagttaacggaaaagaaccgaaagaaggcgatttgatatattttcctatggataacagcttatttgaaattaactgggttgaaccatatgatccattttatcaattaggccaaaacgctattcgtaaaattactgcaggtaaattcatttattctggagaagaaattaatccagttctacagaaaaatgaaggaattaacattccagaatttagtgaattagaattaaatcctgttcgcaatcttaacggtattcatgacattaatattgatcagtatgctgaagtagatcaaattaattctgaagctaaagaatatgttgaaccttatgttgttgtcaataatagaggcaaatctttcgaatctagcccatttgataatgatttcatggattaataaatattataaactaattaaagcccagattaggagaaatcatgtttggttatttttataattcgtcttttagacgatatgctaccttgatgggcgatttgttttcaaatatccaaatcaaacgtcagttagaatctggtgataagtttatacgtgttcctattacgtatgcatcaaaggaacactttatgatgaaattgaataaatggacatcgataaattcacaagaagatgtggccaaggttgaaactattctacctcgtataaatttgcatttagttgattttagctataatgctccatttaaaacaaacattttaaatcagaatttactgcaaaaaggcgcaacttctgtagtatcacagtataatccatctcctattaaaatgatttatgaattgagtatctttactcgttacgaagacgatatgtttcaaatagttgaacagattcttccatattttcaacctcattttaatacaactatgtacgaacagtttggaaatgatattccatttaaaagggatattaaaattgtactgatgtctgctgctatagatgaagctatagatggagataatttatctcgtcgtagaatcgaatggtcactaacatttgaagtaaacggatggatgtatcctccagtagatgatgcagaaggattaattcgtactacttatacagattttcacgccaatacaagagatttgcctgatggcgaaggtgtttttgaatctgttgatagcgaagttgttcctcgagatattaacccagaggactgggatggaacagtaaaacaaactttcactagcaatgtaaatagaccaacaccgccagaacctcctggcccaagaacatagaggttattatggaaggtcttgatataaacaaacttttagatatttctgacctccccggaatcgacggggaggaaattaaagtatatgaacctctacaattagtagaagttaaaagcaatcctcaaaaccgtactcctgacttagaagatgattatggagtagttcgtcgaaatatgcattttcaacaacaaatgctaatggacgcagccaagatttttcttgagacggcaaagaatgctgattctcctcgtcacatggaagtatttgcaactcttatggggcaaatgactacgacgaacagagaaatactgaagcttcacaaagacatgaaagatattacatctgaacaggttggcaccaaaggcgctgttcctacaggtcaaatgaatattcagaatgcgacagtattcatgggttcaccaacagaattaatggacgaaattggtgatgcttacgaggctcaagaagctcgtgagaaggtgataaatggaacaaccgattaatgtattaaatgatttccatccgttaaatgaagctggaaaaattttaataaaacacccgagcttagcggaaagaaaagatgaagatggaattcattggataaaatcacagtgggatggaaaatggtatcctgaaaaattcagtgattatcttcgtttacacaaaatagtaaaaatcccaaataattctgataagcctgaattatttcaaacttataaagataagaataataaaagatctcggtatatgggtcttcctaacttaaaacgagctaatattaaaacacaatggactcgtgaaatggttgaggaatggaaaaaatgccgagatgatattgtatattttgcagaaacatactgcgccattactcatatcgactatggtgtcataaaggttcaattacgtgactatcagcgtgatatgctcaaaataatgtcatctaaacgtatgactgtttgtaatctatcacgtcagcttggtaaaacaactgtagtagctatttttcttgcacactttgtatgttttaacaaggataaagctgtaggtattcttgcgcacaaaggttcaatgtctgcggaagttttagatcgtactaagcaagcaattgaactacttcctgactttttacagcctggtatagttgaatggaataagggttcaattgaactagataatggttcttcaattggcgcttatgcttcctctccagacgcagttcgtggtaactcgttcgcaatgatttatattgacgaatgcgcatttattccaaacttccatgattcctggcttgctattcaaccagttatttcatctggtcgtcgttcaaaaattattattactacgactcctaatggattaaatcatttttatgatatttggactgctgctgttgaaggtaaatcaggatttgaaccatacactgctatttggaattcagttaaagaacgtctttataatgatgaagatatttttgacgatggatggcaatggagcatacaaaccattaatggttctactttagcacaattccgtcaagaacataccgcagcgtttgaagggacttctggtacattaatttcaggaatgaaattggctgttatggatttcattgaagtaactccagatgatcatggttttcatcgatttaaaggacctgaaccagatagaaaatacattgcaactttagactgttcagaaggtcgtgggcaagattaccacgctttacatattattgatgttaccgatgatgtgtgggaacaggttggtgttttacattcaaataccatttctcatttaattctgcctgacatcgttatgcgttatttagtagaatataatgaatgtccagtttatattgaattaaatagtactggtgtgtcagttgcgaaatcactttacatggatttagaatacgaaggcgttatttgcgattcatatactgatttaggaatgaagcaaactaaacgaacgaaagcagtaggatgctctacattaaaagaccttattgaaaaagataagcttattattcatcaccgtgcaactattcaagaatttagaacgtttagtgaaaaaggcgtgtcttgggcggctgaagaaggttatcatgacgatttagtaatgtctttagtaatttttggatggttatcaacacaatcaaaatttattgattatgccgacaaagatgacatgcgattagcatctgaagtgttttcaaaagagcttcaagatatgggggatgaatacgctccagttatatttgttgattcggttcattctgctgagtatgttccagtatctcatggtatgtcaatggtataaatatattaaagcatattaaagaggattaaaaatgactttattatctccgggcattgagctcaaagaaactacggttcaaagcaccgtggttaataactctactggtacagcagctttggccggtaaattccagtggggtcctgcttttcagattaaacaggttacaaacgaagtagatttagttaatacttttggtcaacctacagctgaaactgctgactattttatgtctgcaatgaatttcttacaatatggaaatgatttgcgagttgtgcgcgctgtcgatagagataccgctaaaaactcatctccgattgctggtaatattgaatacacaatttctaccccaggtagtaactacgcggttggagataaaatcacggtcaaatatgtttcagaagatgttgaaacagaaggtaaaattaccgaagtagatgctgatggaaaaattaagaaaattaatattcctactgcaaaaattattgctaaagctaaagaagttggcgaatacccaacattaggttctaactggactgcagaaatttcttcatcttcttccggtttagctgcagtaataactcttggaaaaattattactgattccggtattttattagctgaaatcgagagcgctgaaactgctatgacagcagttgattttcaggcaaatcttgaaaaatatggaattccaggagtagtagctctctatccaggcgaattaggcgataaaattgaaattgaaatcgtatctaaagctgactatgcgaaaggcgcttctgcattactaccaatttatccaggtggtggtactcgtgcatctactgccaaggcagtatttggatatgggccgcagactgactcacagtacgctattatagttcgtcgaaatgatgctattgttcaaagcgttgttctttcaactaagcgtggtgaaaaagatatttacgatagtaacatctatattgatgactttttcgcaaaaggtggttcagaatatattttcgcaactgcacaaaactggccagaaggcttctctggaattttaactctgtctggtggattatcatcaaatgctgaagtaacagcaggagatttgatggaagcttgggacttctttgctgaccgcgaatctgttgacgttcagttgtttattgcgggttcttgtgccggtgaatctttagaaacagcatctactgtccaaaaacacgtcgtttcaattggagatgctcgccaagattgcttagtattgtgctcaccaccgcgtgaaactgttgttggaattcctgtaactcgtgcagtagataatttagttaactggagaactgcggcaggttcatatactgataataactttaatattagttcaacctacgcagcaattgatggtaactacaaatatcagtatgacaaatataatgatgtaaatcgttgggttccattagcagctgacattgctggtttatgcgcgagaactgataacgtttctcagacttggatgtctccagctggttataatcgtggtcagattcttaacgttattaaacttgctattgaaactcgccaagctcagcgcgaccgtttatatcaagaagctatcaacccagtaactggtacaggtggtgatggttacgtattgtatggtgataaaacagctacttctgttccttctccatttgatcgtattaacgttcgtcgtctgtttaatatgttgaaaacgaatatcggacgtagttcaaaatatcgtttgttcgaattaaacaacgcgtttactcgttcatcattccgcacagaaactgcccaatacttacagggaattaaagctctcggtggaatttatgaatatcgtgtagtttgcgatacaacaaataacactccgtcagtaattgatagaaatgagtttgttgcaacattctacattcaaccggctagaagcattaactacattaccttgaacttcgtagcaactgctactggtgcagatttcgatgagttaactggtcttgctggttaatacggtgcattctaaaggcctgtttcggcaggccatataaatacactatatccttaattctttaattctatatgccctaggttaaacatagggatataaatactacagaggctaatatgtttgtagatgatgtaacacgagcgtttgaatctggtgattttgctcgacctaacttattccaagtagaaatttcttatcttggacaaaattttacattccaatgtaaagccactgctttaccagctggtattgtagaaaaaattccagttggatttatgaaccgtaaaattaacgtagcaggcgatcgtacattcgatgactggactgttacagtaatgaacgatgaagctcatgatgctcgccagaagtttgttgattggcaaagcattgctgctggtcaaggaaacgaaattactggtggaaaacctgcagagtataaaaagagcgctattgttcgtcaatatgctcgtgatgctaaaacagtaacaaaagaaattgaaattaaaggtctgtggcctactaacgtgggtgaacttcaattagattgggattcaaacaatgaaatccaaacctttgaagtaactcttgctctcgattattgggaataaaatgaatggggagaaatccccatcctgcttaaagcagagaagtccattataaatataactataattcccatttggagaatacaatgaaatttaatgtattaagtttgtttgctccatgggctaaaatggacgaacgaaattttaaagaccaagaaaaagaagatcttgtttccattacagccccaaagcttgatgatggagcaagagaatttgaagtaagctcgaatgaagctgcttctccttataatgctgcattccaaacaatttttggttcatatgaaccaggaatgaaaactactcgtgagcttattgatacatatcgtaatctcatgaataactatgaagtagataatgcagtttcagaaatcgtttcagatgctatcgtctacgaagatgatactgaagtcgtagcgttaaatttggataaatctaaatttagtccaaaaattaaaaatatgatgttagatgaatttagtgatgtattaaatcatctatcgtttcaacgaaaaggttctgatcattttagacgttggtatgttgattcaagaattttctttcataaaatcattgatccaaaacgtccaaaagaaggcataaaagaattacgtagattagaccctcgccaagttcagtatgttcgcgaaattataacagaaactgaagctggcacaaaaatagttaaaggttacaaagaatattttatatatgatactgcccatgagtcatatgcatgtgatggtagaatgtatgaagctggcacaaaaataaaaattccaaaagctgctgttgtttatgcccattctggattagtcgattgctgtggcaaaaatatcatcgggtatttacatcgtgctgttaaacctgctaaccaattaaaattattagaagatgctgtagtcatttatcgcattactcgtgctcctgaccgtcgtgtttggtatgtagacacaggtaatatgcctgctcgtaaagctgctgagcacatgcaacatgttatgaacacgatgaaaaaccgtgtagtatatgatgcatcaacaggtaaaataaaaaatcaacaacataatatgtctatgaccgaagactattggttgcagcgccgtgatggtaaagctgtgacagaagttgatactcttcctggtgctgataatactggcaatatggaagatattcgttggtttagacaagctctttacatggcattacgtgttcctctttcacgcattccacaagaccaacaaggcggtgtgatgtttgattctggaactagcattacacgtgatgaattaacgtttgctaaatttattcgtgagttacagcacaagtttgaagaagttttcctagatccacttaaaacaaatcttttgcttaaaggtataatcacagaagatgagtggaatgatgaaataaataatattaagatagaatttcatcgggatagctactttgctgagctcaaagaagcagaaattttggaacgaagaattaatatgctaaccatggcagaaccatttattggtaaatatatttctcacagaactgctatgaaagatattttgcagatgactgatgaagaaatagaacaagaagccaagcaaattgaagaagagtctaaagaggctcgtttccaagaccccgaccaagaacaagaggatttttaatggaaggtttaattgaagctattaaatcaaacgacctcgtagccgctcgtaaattatttgctgaagccatggctgcaagaacgactgatttaattaaagaagaaaaaatcgctatcgctcgtaatttcttaatcgaaggtgaagaacctgatgacgaggatgatgacgaagacgaagatagtgatgataaagacgacaaaaaagacaaagactctgacgaagacgaggatgatgaataatgcttctgatccctgaaactcatgaattagttctcgagaatgtcgaagcacttattcctgaagcacagggtcgctttgacgaattgtcttctgctttaaataaagacgatataaatacaattgtcgagaatatgcttgatgatgaaactgatttagcggttgcattagcttctattaatgaaaatatgccgttaaatgaatttatcgttaaacatgtttctgcccgtggtgaaattactcgcactaaagatcgcaaaacccgcgaacgtaatgcatttcaaactaccgggttgtctaaagcaaaacgtagacaaattgctcgtaaagctaccaaaacgaagattgccaatccagcaggtcaatctcgtgctcagcgtaagcgtaaaaaagctcttaaacgccgtaaagcattaggattaagctaatgaatgaaccccaattactaattgaaacttggggtcaacctggcgaaattattgatggcgtaccaatgcttgaatctcatgatggaaaagacttaggtttaaaaccgggtttatacatcgaaggaatattcatgcaagcggaagtcgtcaatagaaataaacgtctttatccaaaacgtatattagaaaaagcggtaaaagactatattaatgagcaagttttaactaaacaagctctcggagaattaaatcatcctccacgcgctaatgttgacccgatgcaagccgctatcattatagaagatatgtggtggaaaggaaatgacgtatacggacgagctcgtgttattgaaggtgaccacggtcctggagataaattagcagctaatattcgtgccggatggattccaggagtttcttctcgtggattaggttcattgactgacacaaataaaggttatcgtatcgtaaacgaaggattcaaattaactgtaggtgttgatgcagtatggggtccaagtgctccagatgcatgggtaactcctaaggaaattaccgaatcacagacggcggaagccgatacaagtgccgatgacgcctatatggctctcgcagaggccatgaaaaaagcgttataaatattattatctaaacaacaggactacaaaatgcttaaagaacaactgattgccgaagcgcagaaaattgatgcttccgttgctcttgatagtattttcgaatcagttaatatttctccggaagcaaaagaaactttcggcactgtattcgaagctaccgtcaagcagcacgccgttaaattagctgaatctcatatcgctaaaattgctgaaaaagcagaagaagaagtagaaaaaaataaagaagaagcagaagaaaaagctgagaagaaaatcgctgagcaagcttctaaattccttgaccatcttgcaaaagaatggctcactgaaaataaattagcagtagataaaggtatcaaagccgaactgtttgaatccatgcttggtggattgaaagagctcttcgttgaacacaacgttgttgttccagaagaattagttgatgttgtagctgaaatggaagaagaactgcaagaacataaagaagaatcagctcgtctgttcgaagaactcaataagcgtgacgcatatatcaattatgtgcagcgtgaagtggcattgagcgaaagtactaaagatctgactgagtctcaaaaagaaaaagtctctgctctggtcgaaggtatggattattcagatgcattctcaagtaaattgagtgcaatcgtagaaatggtgaagaaatctaataaagatgaaagcactattactgagagtataaatactcctgatactgaagcagccggactgaatttcgtcactgaagctgtagaagataaatctgcacaaggtgcagaagatattgtaagtgtatatgcgaaagtcgcatctcgtttctaattttaaaggttaacacaaatgactatcaaaactaaagctgaacttttgaacaaatggaagccattactggaaggtgaaggtttaccggaaattgctaatagcaaacaagcgattatcgctaaaatctttgaaaaccaggaaaaagatttccagacagctccggaatataaagacgaaaaaattgctcaggcattcggttctttcttaacagaagctgaaatcggtggtgaccacggttacaatgctaccaacatcgctgcaggtcagacttctggagcagtaactcagattggcccagctgttatgggtatggtacgtcgtgctattcctaacctgattgctttcgatatttgtggtgttcagccaatgaacagcccgactggccaggtattcgcactgcgcgcagtatatggtaaagacccaatcgcttccggtgctaaagaagcattccacccaatgtatggtccagatgcaatgttctctggtcagggtgctgctaagaaattcgctgctttgaaagcaagtgatactcttgaagtcggaactatttacactcacttcttccaggaaactggtacagtatatctgcaagctacagcagctaaacaaattgattcaggcgcatctgacgcagacaaattagatgctgaaattaagaaacaaatggaagctggtgtactggtagaaatcgctgaaggtatggctacttctatcgctgaacttcaagaaggttttaacggttctaccgataacccgtggaatgaaatgggcttccgtatcgataaacaagttatcgaagctaaatctcgtcagctgaaagctgcttactctattgaattagcacaagacctccgcgctgttcacggtatggatgctgatgctgaactgtctggtattctggctacagaaattatgctggaaatcaaccgtgaagttgttgattggattaactactccgctcaggttggtaaatctggtatgaccctgactccgggttctaaagctggtgtatttgacttccaggacccaatcgatattcgtggtgctcgctgggcaggtgaatcctttaaagctctgttgttccagattgacaaagaagcagttgaaattgctcgtcagactggtcgcggcgaaggtaacttcattatcgcttcccgtaacgtagttaacgttctggcttcagttgataccggcatttcttatgctgcacaaggtctggctactggctttaacactgatactaccaagtcagtatttgctggtgttctgggtggtaaataccgtgtatatatcgaccagtatgctaaacaggattatttcaccgtaggttataaaggtccgaacgaaatggatgctggtatttactatgctccatatgtagctctgactccgctgcgtggttctgatccgaagaacttccaaccggtaatgggattcaaaactcgttacggtatcggtatcaacccatttgcagaatccgctgctcaggctccggcttctcgcatccagagcggtatgccttctattctgaatagccttggtaaaaacgcttacttccgccgtgtatatgttaaaggtatctaatctttgacgatttaagggaccttcgggtccctttagttgtttttatggtataaataaatcatataaactgaaaggaaagcgcaatggctaaaatcaacgaacttctgcgcgaatcaaccacaacgaatagcaactcaatcggtcgcccaaatctcgttgctttgactcgcgctaccactaaattaatatattctgacattgtagcaacgcaaagaactaatcaacctgttgctgctttttatggtatcaaataccttaacccggataacgaatttacatttaaaactggtgctacttacgctggcgaagctgggtatgtagaccgagaacaaatcacagaattaacagaagagtctaaattaactctcaataaaggcgatttattcaaatataataatatcgtttataaagtattagaagatacaccatttgctgatattgaagaaagcgatttagaattagctcttcagattgcaatcgttcttttaaaggttcgtctattttctgatgctgcagtaacaagcaaatttgaaaactctgatagcgaaattgcggatgctagattccagattaataaatggcaaaccgcagttaaatctcgtaaacttaaaactggcatcacagttgaattagcacaagatttagaagcaaacggattcgatgctcctaatttcttggaagatttgcttgcaactgaaatggcggatgaaatcaataaagatattctgcagtctttgattacagtatcaaaacgctataaagttacaggaattactgatactggattcattgatttgagttatgcatctgcacctgaagctggtcgttcattataccgaatggtgtgtgaaatggtttcacatatccagaaagaatcaacttatacagcaacgttctgtgttgcttcagctcgtgccgctgcgattcttgctgcatcaggttggttaaaacataaaccagaagatgacaaatatctttcacaaaatgcctacgggttcttagctaatggtttaccgctttattgcgataccaacagtccattagattatgtaatcgttggcgtagtagaaaatattggtgaaaaagaaattgttggatcaattttctatgctccgtatacagaaggtcttgacttagatgaccctgaacatgtaggtgcatttaaagttgtagttgatccagaaagtttgcagccatctatcggtttattagttagatatgctttatctgcaaatccttacactgtagcaaaagatgaaaaagaagcaagagtaattgatggtggagacatggataaaatggcgggtcgttcagatttgtctgttttattaggtgttaagctaccaaaaattatcgttgatgaataaaacaaagggacctttcggtcccttttttatttaacttaccaattcaatccaagccggacgaagtacatcttgtaccattttaactaattcctttttaaccaaagaaggattatctgcttgagttagagtaataccttcacgagaagtttcttccaaaatatcttgaacagttagtcccatcacctttccaaaatccttcggaccaatttcaccaattttagaaataacgttatttactcggttcagtgtaacgtagcaagctaaaattcccaccaatttgttatcagcttctgatagttcaactttagctttaataggcttatcagactttttcttttcactaaatttggaattcttgcatttgatggctacacgatttccattatgaagccaagaaggataacaaggtttcaatacatatccttcagcggtaaatacttcgcctttggcttcagctttccaaacacatttgttagcgtcaactaatccagcatggtctactgtaaaattataatcttggacgacagaatctaaatcatttggcaatttaataagctcttcaaatttaccgcgacctaaaagtggagccattttaaatttaaatgtattacaaaatgattccatcatataatcatcgacataagtcacatcaccactttctgtagtgacaataatgtcaaatacataaaaatctttatcgccataatcgacattcttctgaatgccaggtccagcgaattcgccaaagacttgataagatacaaccgctgaggtttccataatatcttgtactgctttaatagaatcttcgtaattctttagaataatttcatacccaaagaaatcttcagcaggaagaatcggtccagtacgtttagcgcaagttactttatcacgctcaataatcaatgagaaatttgtgccgtgaatcttttcacgagctacccactccccaccagtcaatcccaagctataaagtttttcaataaatttagagttgtaatgattttcaagactgctatactttttaaacataattaatcctcaaaatgtaatttctaaccaatcaccatcacgctgatcactattgactttaaagctgaatccttcttttctcagccaatcaccaatttcttcagtaatcaatttatcacgagcaatacaataataactaaaatgtgttttaccttgttcagctgctttattagcaagttccgaaaaatctttaataaaacactctagcttaaactgtttacttttaagtgctttttcgcgcaattgattagcaaaagattcattttcataaagatcatactgttccatttttcacctttttattgatatgtctttttctatagacgactttttctcgagtttcaaatttatttttagcagtcatagctcgagcccataatacagccacttcttttgcctgtaagtttaattcacgagcaatttcaatgaatgactttccagactcatgaagagtaaacaccacaacctcagttctcataattaatctcatgttatcgagttgatgccattatatacatcattttctgagtatgttttgtgtgctttcaaaatgaagaaaggggccgaagccccttatgattatgattatggataggtatagatgataccagtttctaaagcagttttatgaatgatgtatccattgcgtgattcttgaacatcaacttctggatagtctttcatcatcttctgaagagtgtaacgatgcaggtagtatttactgtctggatcttcagttttccaatctttaccttcttcggtcattttttggatttcatccataacccaccaaccgcaccagatataagctgaagtacgatgtggaagaggatgaacataaggtagttcaccttctggttctggagcaactttatcagttacctgaacttgaccttctgctgtaatagttttgctatcgtaatcagttgcagtaacgacagcagtaacttcaatagtttgacttccaacagatgaggtatcgacagtatatacgttagttgacccttctacaggagaagaatctttcttccatgagtaagtaatttgtgcttcttctggagcacccgtaacattagccgtaaatgtagccgaagcatcttgctgaacgttaatagaaggaggagtcaatgtaacctgtggattcattgttttcttattaacagtcaatgatacttcattagaagtaacttccttttcattgtaattttctgcagttacttgcgctacacacttaactgttttagctccaactgtggtaggagtatagttaaatgtagtagtagtttctccatcgaccagagaaccgtcaacataccactgatacgtagcagacgctcctggtggctgtgaatccaaggcagcagtaaattgaactggggttccaattactccggcagcaggattagcaggagttacggctaacgtagttgtctgtgtcttcttattaactgttaatgatacttcattagaagtaactgtttttgcgtcataatctgttgctgttacttgcgctacgcatttaattctttttactccacttgtagttggagtatagctaaatgtagcagaagtcgcttcaccaatttgagaatcatctacataccactgatacgtagcagatgccccatcaggttgagaagctaaggcagcagtaaattcaacggctgttccaatcactccagctggaggactatcaggagttactgccaaggtagtcgtctgcgtctttttattaacagtcaatgatacttcattagaagtaacgcttagtgcatcataatctgccgcagttacttgagctacacacttgatttttttaactccgcttgtgtcaggagtgtaattgaatgtagcgtcagttgcttcgtctacaggagaaccgtcaacgtgccattgatacgtagcgtttgcacctgatggctgtgaagctaaggcagcggtaaattcaattggagttccaatcactccagcatcagggctaccaggagttacagctaaagtagttgtttgtgtcttattttgaactgtgatagttgtactaatttctgctgtttcaggttcagattctgcaacttgattggttgcaactactttaatagtcttttgaccggcaggtccttttagtacataactaaaagttgctgacgtttcttcctgtggagcgtcgtctacagtccaagcatatgtaataggtccatctccagtttgaccactgggtgtagcagtaaactgctgagtctgatctataactccagtaggtgttttaggagttatatcaactgtaaaagtcataagttatccttattttaatgttacgaaagaagagttgcgtgtttcacgaattaaaactgatccgtcacggttaatgtaataaattaagctaaataaagtttggtgtgctgacgcatgttcaaaactagttgggtgagatttccaatcaggagtttcagcaatccattgataaatccaccaaggaacagtacagaatcctggattttttccaatcaactgaagattcgggctaaagttttccggaagagtaaatacagacggcttttcagattcaataatctcagctacagcctgttcaaatttttcttcaacaaatggagtatcttcaatcaaaacatcggtattttcaggaattttatctgtttctactacttcaattttaatgtcagatttaaccggagaatcaatcaaaagtgctgcttctggattgacttcttcatcgtcatattttaacccctctgcagcatcagcagcatcaattaagtctttaatagataacccatcagtctccggcataggttcactagcgagcttctggagggcttcttcaatatcaacaacgatattatcaaaagatttattctttttgacctttataccaaactgttcagcatattcagctaatttagctttagcttctttgttatcatcaagagccttcagctctgcaatataatctttatctatcataatatttcctcagtataaatatagatatatttattacatggtatttagacatgactgacattaaagtacatttttatgattttagtcacgtgagaattgattgtgaagaaagtacatttcatgaactccgtgatttctttagctttgaagctgatgggtatcgttttaatccgaagtacagatatggccactgggatggacgaatccgtctgttagattataatcgtcttcttccattcggcttagtcgggcaaattaaaaagttctgtgataactttggctataaagcctggattgacccacaaattaacgaaaaagaagaattatcaagaaaagattttgatgaatggctttctaaattagaaatctattcaggaaataaaagaattgaaccacactggtatcaaaaagatgcagtgttcgaaggattagttaatcgtcgtagaattcttaatcttccaacatccgctggtaaatcgttaattcaagctttgcttgcgcgatattatttggaaaattatgaaggtaaaattcttatcattgttccaacaactgctctgacaactcagatggctgatgactttgttgactatcgtttattcagtcatgcaatgataaagaaaatcggtggtggagcatcaaaagatgataaatataaaaatgatgcaccggtcgttgttggtacatggcaaactgtagtaaaacaaccgaaagaatggttctcacagtttggaatgatgatgaatgatgaatgtcatcttgctacaggaaaaagtatttcatctatcatatcaggtttaaataactgcatgttcaaattcggtttgtctggttcattacgtgatggcaaagccaatatcatgcagtatgttggaatgttcggtgaaatatttaagccagtaacgacctctaaattaatggaagatggacaagtaactgagttaaaaattaatagtatttttcttcgctatcccgatgagttcactactaaattaaagggaaaaacttatcaagaagaaataaaaattattactgggcttagtaaaagaaataaatggatcgctaaattagctattaagcttgcgcaaaaagatgaaaacgcttttgtcatgtttaaacatgtatcgcatggtaaagctattttcgatttaattaaaaatgaatacgataaagtttattacgtatcaggggaagttgataccgaaacccgcaatataatgaaaaccttagctgaaaatggtaaaggaataattatagtagctagttatggtgtattttctactggtatttcagttaaaaatctgcatcacgttgttttagcgcacggtgttaaatcaaaaatcattgtattacaaacaatcggtcgtgtattacgtaagcatggttctaaaacaatcgcaacagtctgggacctcatagatgactgtggtgtcaagccaaaatctgctaatactaaaaagaaatatgttcacttgaactatcttttaaaacacggcattgatcgtattcagcgctacgcagatgaaaaatttaattacgtaatgaaaacagttaatttataagggcttcggccctttggagaaaaagatgttactagaatttaaacaatttctttatgaagcttctattgatgaatttatgggtaaaattgcctcttgtcaaacattagaaggtttagaagaacttgaagcttattataagaaaagagttaaagaaactgaattaaaagatactgatgacatctcagtcagagatgctttggcaggaaaaagagctgaattagaagattcagacgatgaagtagaagaaagcttttaaattaaaaaaggcccaaccaaaaaggaagggccaaaactatagactaaaggtcacactatagcaaaagttgcgtttcatttaattgttcttccgaactttctgaaactggtagttctttaatgtaattatagcaaggcccaggatgtacaggacctttgtctgtttcaacaaccaatgcagaatcgattggagttttacagacaacacaaatcttatctgacatgattgtctcctctgaattatatatctatttatacaactctcatatgcatatcaatgcccatatctttagaataaaaatattcatcaagatatccggcaaattttcctttaatataaagaacatcttcaccgcacgggtggtcggccaggatacgaatatcctgacgcttgagattatactttttcattaagaattgaatttccgtttcgaattcttcttcataattaaaagcatcatcaatgctatatttcattattttccagcctcaaatgctcgcatgtcttgaatatgcttaatagcaaatccgcgtgatttaatagcatcaagagctccgctacagaaatccaataaaatcccccaatactgcaacgaggtatcaacctttaaaacatccttatcagctgatagaactgtcttcatttctgatttctcgtaacgatccatactaaattcatcaccatctcctcgtcccgagtagtagtctaatttagctttaagagcaacttttttctgtgcatcaattctaagcatttcctttttaatacttgaatgcttattaagccatttactatataacatcacattattagctgcttcatactgtaatttagtcgaatctataaacacatctttcttcaattcttcttgaagatcttctaatctcatattgttctctattcaattgttattggatggacttagattcattataccacgtttatacgtgaagcattatactctattactggaagccagttgtagttttatctgctcaatatcatcagggttatcgatgactgaaaagcgtatttctactatcagagtataatcatcataaactggtatcacattaactgctaatttatcaatacgtggctcatagtttcttactgcgctttcgatattgcgctcaactgtgtcagcagtaagaggagtcatattttcaaaaagctggtctgataaatcacatccaaattcagggtcaaacggtcttgaaccttttcttgttgtaataattcccaaaagactgtttttaattgaccttaatccaagcgatctggaaacatctttgttccaatccattttcatttctgggtcaatgtcagaataaagcttattaatatttgccattatagtaactcaaagaactctttgaggcctcttattacatgagcatgggtttttccacactctggacacttaattggaacagccaaataaacggtaggttttaaaagcatatcttttatagctacaatatctgactctgtgatgatagaatataaatcttctagttccttttcatttaagtcttcaactggaatgctttccccgttagcatgaatcgtttctatgcatgatactatcatgtgggctatatttttatcatcaaaaattttagggtattggaatttaattttaatgtcacccagtgtataccagaggtcttctggtgcatctatttgtgtatgtaatagatttatatgggttggtatttcagttccacaggtgcacttccaagagttttcgtgattaacttcaccaagagaatgcgcccataaatgaatcaacaatagttctgattcttggcgatttaaatcttttgcatttgtgcagtctttgattagctttttaacaattacttctacagaaccattatttttggcagtaataagttctagatattctttaagagtaaatgcgcgacagttgattattttagaaccaactctcacatcaaatttgtattcatacatatttagctcctttatttatcatatttataaatagaataaaaggagcatctatggcaaacattattcgttgtaaattaccagatggtgttcatcgttttaaaccatttacggtagaagattatcgagattttttgttagttcgaaacgatatagagcatcggtcaccacaagaacaaaaagaaataattactgatttaattgatgattattttggagactatccgaagacttggcaaccatttatatttttgcaggtatttgtagggtcaataggtaaaactaaagtaccggtcacatttgtatgtccaaaatgtaaaaaagaaaagacagttccatttgaaatataccaaaaagaattaaaggaacctgtttttgatgtagctaatgttaaaattaaattaaattttccttctgagttttatgaaaataaagcaaagatgattactgaaaatattcattctgtccaagtagatgaaatatggtatgattggaaggaaattagcgagtccagtcaaatagaacttgttgacgccatcgagatagaaacattagaaaaaattctcgatgcaatgaatcctattaatttaacattgcacatgtcgtgttgtgataagtacattaaaaaatacactgatatagtagatgtgtttaagctattagttaatccagatgagatatttactttttatcaaattaatcacacgcttgtaaaaagtaattatagcttaaattcaataatgaaaatgattcctgccgagcgcggattcgtattaaaactgattgagaaggataaacatcaatgagtatgttacaacgtcctggatatccaaatctcagcgttaaattatttgagagttatgacgcttggagtaataatagatttgttgaattagctgctactattaccacattaactatgcgtgactctctttatggtcgaaatgaaggaatgctgcagttttatgattctaaaaatatccacacaaaaatggatggaaatgaaataattcaaatttctgtagctaatgcaaacgatattaataatgttaaaacacgaatttatggatgcaagcatttttccgtgtcagtagattcaaaaggcgataacatcattgctattgaattgggaactattcattctatagaaaatcttaaatttggtagaccatttttccctgatgcaggtgaatctataaaagaaatgcttggtgtcatttatcaagaccgcacattattaactccagcaataaatgctataaatgcttatgttcctgatattccatggactagtacatttgaaaattatttgtcctatgtaagagaagttgctctagctgtaggaagtgacaaatttgtatttgtgtggcaagacatcatgggagttaacatgatggactatgatatgatgataaatcaagaaccatatccaatgattgtaggtgagccatctttaataggtcaattcatccaagaattaaaatatccattggcatatgattttgtttggttgactaaatcaaacccgcataaacgtgatccaatgaaaaatgctactatctatgctcattcgtttttagattcttcactgccaatgattactacaggaaagggtgaaaactctattgtagtgtcaaggtcaggtgcttattctgaaatgacttataggaatggctatgaagaagctattcgtcttcaaactatggcgcaatatgatggctatgctaaatgttctactgtcggtaattttaacttgactcctggtgttaaaattatttttaatgatagtaaaaaccaatttaaaacagaattttacgttgatgaagttatccatgaattatcaaataataattcagtaactcatctatatatgttcactaatgcaacgaaactggaaacaatagacccagttaaggttaaaaatgaatttaaatctgatactaccactgaagaaagtagttcttccaataagcaataaagaagtttctattcctaaaatgggtcttaaacattataacattttaaaagatgttaaaggccctgatgaaaatttaaaacttcttattgattctatttgtccgaatttgtcaccggcagaagttgatttcgtttctattcatttattggaatttaatggaaagattaaatctcgtaaagaaatagatggctatacttatgacattaatgatgtttatgtatgccaaagattagaatttcaataccaaggaaatacattttattttagacctcctggaaaatttgaacaatttttaacggtgagcgatatgttatctaaatgcttgcttaaggtcaacgatgaagttaaagaaattaattttcttgagatgccagcattcgttttaaaatgggcaaatgatatttttacaactttagcaattcctggccctaatggtccaataactggaattggcaatattattggattatttgaatgaaaaagccacaagaaatgcaaacgatgcgtagaaaagttatttcagataataaaccagttcaggaagcggctaaatccgcttctaacactttatctgggcttaatgacatttctacaaaattggatgatgctcaagctgcttctgaattaatagctcaaaccgttgaagaaaaatcgaatgaaataattggagcaattgacaatgtagaaagcgcagtgagtgatactactgctggttctgagttaattgctgaaactgtagaaattggcaacaatattaataaagaaatcggtgaatcactcggaagtaaattagataaattaacgagtttactagaacaaaaaattcaaacagctggaattcaacagacaggaaccagcttagctgtagtcgaaagtgctattcccgttaaagttgttgaggatgatacagctgaatttgttggtccattattaccagctcctgaagcagttaataatgatcctgacgctgattttttccctactcctcagccaattgaaccaaaacaagagtctccagaagagaagcaaaaaagagacgcatttaacttaaaattatctcaagctttagataaattaacaaagactgttgattttggatttaagaaatctatttcaattagtgataaaatatcaagcatgttatttaagtataccgttagtgctgctattgaagctgctaaaatgactgcaatgatattggctgttgttgttggaatagatctgttgatggttcacttcaaatattggtcagataaattttcgcaggcatgggatttgtttagtacaaactttaccaaattctctagcgaaaccggaacgtggggtcctttattacagagcatctttggttctattgataaaattaagaagctgtgggaagctggagactggggcggattgacagtagctattgtcgaaggacttggaaaggttctttttaatttaggagagcttattcaacttggaatggctaaattatctgcggcaattcttcgagttattcctggtatgaaggatactgctgatgaagtagaaggaagagcactagaaaatttccaaaatactacaaatgcttctcttagcaaagaagaccaagaaaaagttgcaaattatcaatataaaagaatgaatgacgatcttggtccaatagcaaaagggctagacaaaattgcgaactggaaaactcgtgcatctaactggattcgtggtgttgataataaagaagcactaacgactgatgaagagagagcagaggaagaagaaaaattaaagcaactttctccggaggaagctaaaattgctttaatgaaagctaatgaagctcgtgctgctatgaatcgttttgatgaatacgctaattcagctgatatgagtaaagactcaacggttaaatcagttgaagctgcctatgaagaccttaaaaaacgaatggatgacccggatttaaataattcactggcagttaaaaaagaacttgctgctagattttctaaaattgatgctacttatcaagagctcaagaaaaatcagcctaatgccaaacctcaaacttctgctaaatcgccagaagcaaaacaagtccaggtaatagaaaagaacaaagcacagcaagctcctattcaacaagcatctccttcaatcaataatactaataatgttattaagaaaaatactgtcgttcataatatgacacccgtaacgagcacgactgctcctggtgtatttgatgcgactggagttaattaaggaataatatggcaattgttaaagaaataactgctgatttaattaaaaagtccggtgagaaaatttcagccggacagagtactaaatcagaagtagcaactaaaacatacactgcccagtttccaactgggcgtgctagtggtaatgacactacaggggacttccaggtaacagatctatataagaatggattattatttactgcatacaatatgtcatctagggattctggaagtcttagaacgatgagatctaactactcttcttcatcttcgagtattttacgtacagccagaaacactatcagtaatacagtatcaaaactatcaaatggactaatatcagataataattcaggaacaataagtaaagttcctgttgcaaatattcttttacctagatctaaatctgacgtcgatacgtcatcacatagatttaatgatgttcaagatagtcttattacaaaaggtggaggtactgctactggtgtgctaagcaatatggcttcaaccgcagtatttggagcgctggaaagtataacacaaggtataatggctgataataatgaacagatttatacgacagccagaagcatgtacggcggtgctgaaaatagaactaaagtgttcacttgggatttgactccgcgctcaacagaagatttaatggctattattaatatctatcagtattttaactatttttcttacggtgaaactggtaaatctcaatatgctgctgaaataaaaggatatttagatgagtggtaccgttctacttttattgagccgttaactccagaagatgcagttaaaaataagacgttatttgagaaaatgacatcgagtttaactaacgttcttgtagtttcaaacccgacaatttggatggtgaaaaactttggtgcaacatctaagtttgatggaaaaacggaaatattcggtccatgtcaaatccagagtatcagatttgataaaacacctaatggtaactttaacggattagctattgctccaaatctccctagtacatttactctcgagattactatgagagaaattatcacgttaaaccgtgcttctttatatgcggggactttttaatgtattctttagaggaatttaataatcaagcaataaacgcagatttccaacgtaataatatgttcagctgtgtttttgctacaactccatcaactaaaagctcttcgttgataagttcaattagcaacttttcttataataacttgggcctaaattcagattggttaggattaactcaaggcgatattaatcagggaattactacgctaattacagctggcacacaaaaactgataagaaaatcaggggttagtaaatatcttattggtgccatgagtcaacgtacagttcaaagtttattaggctcatttacagttggtacatatttaattgacttctttaacatggcatataactcatctggattgatgatatactctgtaaaaatgccagagaatagattatcctatgaaactgactggaactataattctcctaatattcgtataactgggagagaattagaccctttggttatttcattcagaatggattcagaagcttgtaactatcgtgcaatgcaagactgggttaacgctgttcaagacccagtaactggattgcgtgctttgccgcaagatgtcgaggcagatattcaggttaatcttcattctcgcaatggattaccacatactgcggtgatgttcactggatgcattccagtgtccgtaagcgctcctgagttatcatatgatggagataaccaaataactacatttgatgttacttttgcgtatagagtgatgcaggctggagcagttgatagacaagctgccattgaatggcttgaatctgctactataaatggtattcaaagcgttctcggaaatagtggaggtgttactggactatctaattcgctttcacgacttagtagattagggggaactgcaggaagcatttcaaatattaatactatgacaggaattgtcaattcgcaaagtaaaatattaggagcaatataacaatggggaccgaaaggtccccatattttatttacggaatgaaatgaaagcagaaactgaagcaactaaactgtcttcaatataaacttcaatttttaccggagcttctgactcaaatttacctgttactacaccttggaaaatactttcagtctgttctggttttgaaaaattttcagaaggaaaaattccgaactttttatctgttccaaaaattttaataaattcatcgtaaactgcttcattaaaagcattatcagcaggaataacgccttcaacgacgagctcttggcctaaaaagcgtaaagaagatttcattttgtgttcctcatgttatgtcagtaagactactataacacaacacgagggacttgtaaactacattttgaactttttagacattccgttgatgttaaccaaagaagctaagatttgagaaacttcattttcctcttcttttgattcttctacaaggaattgattaaatccagccattggacgaacttcaccagtttccattagatggtctccatcatatactgattcttctaattgttcagaaggaggaacgattgtaccttcgattagatacttgttataagcagtttctttcataaagtacgtacttactttattaatcttcagtaaaattccacgtggtagaataacttcagcttctgatggaaatcctgataaatgacctggaacgataactttgattcgctcagctcctttaattaccatacccacgctagtttcagcatcttcattagcatatgtagaatgactacccatatgcatcaaatcttctgcatcaacggaaccttctccttcgccagaaaatactgcgccagaatcatctagagccatatagtttttaccatgctcaccgaagatatttggtttaagcgatgtggatacgaagttcttgaaatagaacattttgttttcaatgttatgacgcaaagttttaaaggtaacttcttgtccacgataaagcgtagttcctggaggaagaactgaacctttagcgaatgcagaatccaacgtctcgatgtgcttaatagctcgttccatatattcttcacgggtagaatctggtttacccaaaaggaacgagttcatttcaacatatgaatctgcacaataatcttcaattacatcagattcagcctgagtcagtccttttggagctacttcggtgcttgcgtattcatatgcctgggcagcagattcattaatcaatttataaatgccattcatgacaaattgaataatagctgtcttttcatctggtgtggttttagaacctttaactaaatcattaataattttcttaataacatcaaagctattagaaatattaatgtcagcaagatcgcttaaaattttatcagttttataatcaaagaattctttattctttaaatattcttgagaaccttgatatgttatatcgctctgcaacttgatagatggatcacgtaaacgtgcatgggccaatgcaatatgatttcggaagctttctagttcataatcgttagatttaaaacgagaagcacttctcataccaccgatagctcctttgctgaagtttgaaccaatctggataacgccagagttcatcggaccttctgctttatataccggaactttagattcaaactcttgatatttcttagcagcgaagctatcaccctgaagcgaagcatcaacagtagaatattgagcttgtgctgctaatcgacgactaattttagttttctgaataacagcttggtccgtgcgcttatcattttctaaagcaatagaagcagcaacagcaacagctttaggaacagcatttcctgttttaacgtctacataaacatcaccgacctttgattcaacttttgtgaataactcagttgaaataggaggtacacctggaatgtcttctaaattggcatttttacggtaaaccataatatatgcatatttcttatcatagtcccagatttcctttaaaagaacatatcgacctgctcctttagtacgtactaaacggtcagcaataacttgcatttgacgagctgcgccatttgttttactttttagtacgcggaataggcatgcgtcgattttatactgtttcattgtttgaagagcagtatcaaaaacggcattaatgacaccaattggatttccacccaagtttttaagcttaactaatgatagtttctcattaacacctatcattacgatatgcatcattttatcgcctggcttaacgtttttattcgtatcaccaccagaggtatatgtacaaaatctaaatccaggaagcgcgctttcttcgccggcttgaatagcaaaaatttgtggtattttatgcttaggatttaagttaacaaccggcgccgaagcgccgtcaaataattctgtaataagttccatgatttatccttgaacgaacttgtaaggcatgtttgcaatatctatacaagacgcaataattccaagagatgattctactttctgtttaacgtttgatgaaacaaatgatgcaaagtcaactctgtcttctatttcaatatcacctgtcattgcaactacttcgccggtttccattagacggtcaccgtcataaattaccgattcggtgagttcttctgtggtcataacttcagcttgaataagcttgttgttagttttaactgttccatcattgtaagatgcatcggttattttattaactttgaccattaatccacgtggcaaaatgacttccatttcatttgaaggtgctaaacttccacctggtaaaacaacattgactttatcagccccagtaataacccatccaattccaactaaattatcgctagaatttactagtccttcatcagttttatcaatagaaacacttaaacgcttttcgtctggtaaaacacccacagatgaatcagtcatccaggtaccaaaaatatttggatataatgatgttgacacaaagtttctaaaataaaaaactcgattttttaccagtgcttcatatattgaaggtaacattcgttgtgaacgatacaaagtaataccttttggtaatcgttcaccatttttaaaggcagaatctaaattatcaatagctttttctatatcagatgctgtcaaaatacttgtacgctcatctggattatataatcccaaaagagcgttatttatgtctacatatcctgaacttacgtattcacgaattccgcgtttttgtgccggtgtgtatttagatgaatctttattttcgactataggatgtagtgaccatccagcggtaagagcatatccacgcaattctcttcgaataatctttgtttttattgcattccaagaattttgtactaactcattcgcagcatcttgatttaaatgcgaatgcttgttaatgtttctttctaaccaagcacctttatatttttctaaagtatcatcaactatagaagcaatagtttctaaagtttttattgaagtaatagattcttttcgtaatctttctaaagctttattttttatttctgcattaacatcagattctttatcttcaggaattatagaagcttctctgaatgccattccagctgtaacactactaagagcattctctaatgcaaatcctgaagtagaaataacagttaattcattagcgtcagaaattaaaggagcgtcagcaggtttatttaattctgctgctgaagcctcaaatttttgaaacatcggcgtttcaaatctagaagattccaatgattgactttgcgcaattgctctacgggaaattttaactttaacgattacagcttggtcagaacgtttatcattttcttgcgcaatagatgctgcaattgcctcatttttagttacttgagctccagtatctttattgatataaacatcaccgaccttcgattcaactttagtaaagagctcagtactaatttccggaactcccggaatgtcttctagtgatacatttttgcgatgtataagaatatatgcatactttttatcgtaatcccagagttccttaagaaggacgtatctgccacctgaacgactacggataagtctatcagcaataacttgaatttgtcgagcttgaccagcggttttagacttaagaatacgaagcatacaggcatcaattttatactgacgcattgtttgcatcgcaacagtaaaaactgaattgatataattaattgggcttggaccaagaccttttaatttagcaattgaacctttagcagttaatgtaaaaggaacaatatgcatcattttatcgcccatctttaaatcgcgattagtatcacctccagatgtataggtacataaacgaaagcctggttgttcaattgcatcatcaacatgaactgaaaaaatttgcggtattttcttctttggatttaagtttgtaatcggaagagtagtatcttcgtcaaataattctgtaataagttccatcatagcctctctagtgtttattctatttataaaattaaaggcccgaaggcctttaataatctagtggtaagagagtacggtatatttcaaactttggacctttttcataggcatcaaatgtttctgtgaatttattataagcgtatgcatctacaaattcgagaatgacttgtgatacagaagtagaaacatctccaccttctttttgagcaatgacaattgtttctaagtaagctttcataaaccagttacctcatgaaaatcaccaaatacatcctcgaatgtattagctttagttttatcttcacgcaaacgaatcgcaatcggaagaaataatttaacgtaatcagtgcggccatcagattttaaccaaccgttgcattcgcactctagaatttttccaatataataattttggttttccataatgcgagtacggtcaagttcatgcgattttacaccggctttatcttttaagcctgaaccagcatttactttaatttttccacactctgactcaagaataaatccacctgctttagtagggtctttacggtgaggataaattcctacaatttttaaatcaacatcaattacttctttaaatttatagagattttttgaacgagcattttcccataatccatcgatatttttgagaataataccttcaagaccttggtcaatatactttttataaattaccttggcttcgtctaggttatttactacctggttttcaattaaaattactttatcatagcctgatgtcatttgttctagtttagaaaaacgtacatcatatttcaaacgaaatgcaggaagaccgtatatttctaccaacggtacataatcccagacctgaaacttcatgcattgtgcttctttttcagaaatggttccctttaaagatttattggcgatgccattagatgcagtacgtgattcagctacttcggcgaattctttagctttactgttttcaggataagcatcaaaaagaaaatctaggccttctggctccttttcaacttgctcatggtataccaattcgccatcaattaacacgccttctggatgaatctgacgggcttcagcggtcattttgattaattcttccttaagaagatctaatcctagatattcattaccagctcgtgataaaagacgaacgtcatctaattcatcacctctgacttcggcaaagcaccgagctccatcagcttttaactgggcaaaggctggaaatttgatattcttattaatgcctttttcatcataagaacttgcgagcatttgaggttgttcaggaattaaacctggccaaactttgtttgcaatagatactgaagcaccacattcaaggtctcgcatcatcactcgacgcaaaacttcaacatcatcttttttaccgtcagtaatataacctactaattcctcaattgccgcatttccggtcaattttcgagtagctaatgtaaattcaatgaagtcaagcatatcagtaatagtcagcattccaaaactctgggtagcaataccaggtttaggccatttcttgatataatactgtaacccacgagaataagtcagacgatatactcgtttaagcaattcattatctttattcttttcaagaattgcttgcttctgcttagttgaaccaatagatgctatttcgttcagaattttaagaatcattgttcatcctttagagtttggtttacagctctattataaatcaattcatcattaagctcagtcaaagacctgtggtacgtggttctaactttatttccttgcatccagtgcttgacgtaaatgaaaccttgctctacgcattttttaaaaattcgttcgtctttttgagctcggaattctggattgcatctaaaaaattgatttacgtgaccgtaatcacgtgtagtattaccttcattttcataaatagtgtgaacaacaaacattagaatgctccttggaaaatattattagcaccagtaggtctattatacaaatactctatgccaccgggtttaatatagttccatgtctgaaacggatgcgtctgatatggatgatatggattataaggattaaatccaggagttctccaggtagtgttccaaggaaaagaatcgtttttaatcatcttttcaattacatcttttatagctttttcactatcaaaactttctttattttccttcggtgaaaaaagcttattttctacatcattccatgtataaactcgctgagcagtttttggaatattgtcacgctctcctcgagccatccaataaacaggaacatttaatatttcactcgcatgatcgcaatggtgagcgagatcgtcaatataacaaatcacgttatatttctcttttgcctttttaaacaactcttcttttgaagaatcatgaccacacatcagtacttctgagaaggcaccaggaaaaagagcgtttaaattaaattgacgattcagcagagcgtcaatagaatcacccaatgctgtaacagctacaaaattataatcttcttttaatttgttaattacacacagagcatctttatatggagacaagtaacgaataaaatctgaacgattgtatttttcaattagcttgacgccaagttcttcgtcacaattaaagagtttacctggagaaataaatttctcatcctggatcatttttaaaatatgttctaacggaagattatatttctgagcaaaataaggaagacctgattgccagcttaaacatactccatcaatatcagttaaaatagtaggcttcatagagagtctcttaataggtttaacacatcaataaattcagcttcggttagtattgtatcatcttttgttagaccactagccatgctgtgcttcaaaacttttcctttcgaggcttgtaatgcatcacgaaagcccttgttttgaatcgctgcttcaaaatatgcatttgtgtataattctttccacgccggggagtatcttgaaaatggaactccaagccagaagagggtcccacggtcctgagctctagcataagaccttccagcttgttgagcggcaagcccggataacccaaatatacgacgttgttgttcaacgtttttcaccttgcatccttggaggaatccttcaagacctccaaattgaataccatccataacgaaaggccaatgggcgaaattacttaatgcacatgatggccacctaaaattacttctaatctctaactcagacattttcaatgcttataatttcaacatcagcccaatgaccatagtttggtagacgaaattcaactggccagtcactgcctttttctaatataatagactcaatttgtggttcttcatgttcatcggtatatggatttttatctgttactttatatgtgaccttaatgtactgaattccaaaaatcttattaattatattcatactaattcctttaatccgtagataggagataattcatcacccatacgaaggtcttcatttccatctacccaggaaacaatataagcctcttttatttgaataccactccatttaaatggaggtaaaaccttagaaattaatccaggtataccaactccctttaattcaacggtttgatctaaaaagaatttcattagaacctcatctgaaaaccatgcgatttaacattacctccaccaatatcagaaatattaatttcgcgcgcaattgaagggtcaatgtcaatttcacgattgagtttagtgatagctaaagtatcgcgcccatttacagtacgaaactctaaaggacaaaccacatcaacgtagtttttaatcgattcgctagtaggctgcaaatgtgcaggaaggtctttaggcgcctttgagaaaactacttcgcagaagtttttacgagtatcaaaataagtggtcataaacataataatttcctcaataaggggctgaagcccctcattttattttaaatatcaaattcgttaagaactacatcaaagattgcttcaagatgctcaggtttagctctgttactcagaatatgacgaatccaagttttaactaagagtttacgattagcaccattccagcaaggatgagtccctaaatcgcgttgacggaaatcatcatccagagcgattttaaagttggaaccttccattgtgattgaaaccgtgatgccattttcaaatcgcatataaacgtagttaggagtcatatactgttcaatttcgcatactgatccattttgatgtttccaaaggcagatggtatcaatagaacctgtaataccattagaaacatatttacgttcaaagttaatgtagttcattttattctccaagatgtttaattgcggtacaggtatataatatcatgtcctgtaccaaagtaaacaattattttactactttccaatactgcatgtcaagtttaccgacttttttcatcttctcaattaagcgttcggcacgttggcgagctgtaacataatgccattcgcctaattcattttgttcaatttttccaacgattactgtattcaattcataaatccaaccagtaaagaaattatgaacttgaattgtaaaggtgaaatctgttcccataccttctgttgtttctacttcaataatatcaccttcaactgccattaagaaccacatagtttcattatatttaccgttgaagcatttagttttaactgcagcgttcagattaatcgttttcattttattctcctttgtttgtgtaagataatactatcacaaaggaaccgtactgtaaacaactttgtgcaatctttggaaaataaaaaaaaaaggactcccgaaggagtcctcaacttatgctttctgcttaccaaaacgagaagcatcatctcgaagaaccgcacgtgctcggcgcatgatcttctcaacagtttgattgatacgagagttcgacccacgcttgtagccagcgcgtttagaatcaccaactttcttttcaactgctttctttgctttagcttgttttgccattataaattctcttttaaatgaaaatgcaggacttattggcattgcctgcgcaagccctcaaggggaacataggtttttggatatttaacgaccaggataaccataaacccgtcatcataccttatagctcttatctgttgcacaccgttagcttaaaggttccgggttcgatttctcgaggataagatatatactgatggatatataggccttgaggcgtactcccgattggccatcacctcggggtagcatgcacttgccgctataagaataacattcaagaggtacaccgtaaaactgccggggtcttaaaactataatgattcgcaaatcattaatcagacagttcgacggctcctcgattttagctcacactaaggcagtgaatctccaataaattacttcagtgttaccacaaagtgacgaactgcttttcgtgcagcagaagccagaggcttagcatatttaagttcatctttttcctgaagctcagcagctaatgcagtttgagcaggattcagatgtttgaaataacgcaggatttcaagagcttcggcttcaacatcaatagatgcgccatagttttcgtgaccattattccatgcgtttcgttgcagttcaagagcgtgttgtaattgtttaatcatttaaaaattctcgttagagattaaaactcggtagtcacgttcttctgaatttcatcttctttcgacagatctctcagttgtagactaccacatagaattgttcggttaacttattattccgacacccaattcatattattatttatatcacttataaagacacggaatagctttatagtgacaggtaacgaatttttgtttaatttcttttggctgcttaagacccagagctacaaaaggatgcggaacatttcgaatttgaccaactggaagagaagtcaaatcgccaacttcgcagaaaccttcaggaacatcaggaccgacagagtgaactacacacagttcaggaacttcaccttgaacacgtttaccgataataagtcctgattctgtaacttcttcatcaccggcttgtgcaggttcagaaactaaaataacatattcaccgacagcacgaattggtagctgttgtacttcagacatcgtttttcctttttgttaacagatgaattaataataacaaataattcttaaagcatttatttaccaataaattggagcaaatgctcaactttcataccattaacggaaatcaatttgtcaatagaaaaacctcgccatgcaccaagctcaacatcaaataccggaatcatgtcagtagattctttccgagtagattcagtcaatttgccagtttgcatggttggcataaagtccgcgtcgcgagtacctttcataacacgaatagtaccgtcagacttttcaaaaactacgtttgaaacacccatggacaatttagttttcaaaatttcacgaattgctactttttgttcagtcgtcagtttcatttatttacctattacagttttaatatgagttgttccacgttctttaagagtggaaagtaatttttggcatttttctaaatcagatttccaactatgtggtctatcaatacaaacccagtttgacttataatactgcttccatttagagaaaaaatacttcttatactctacagcaaatgaaatgttctcgttggaataagaactaattgctgtgagttgtaccaaacgaaatttcattattcaccacagaattcgttgatattttcccagtttaacttattcaagtttttcttaggaacattaaacacttcaatacctgcatttcgcagaatatcatcccagccaggtttatttttatcgtatgtttcacaataaaccagctttttaattccagattgagctattgcttttgcacaatctgggcaaggagaaagtgttacatacatagtagcaccttcaattgaagaaccgtttcgtgcagcaaacaaaatagcatttagttcagcatgaatttcatttttagacgaccattcagagtgcgcgctacgatgttctttcgccaatacaaaacgatcagttgaaccaaacgatacacattcaggcttatgaccttgaatgatagtatgtttaggcttattcagcaaccaaccttgctcagcagcataatcacagcagttcacaccacctgcaggtgaaccattatatccagtagaaataatacgtccattcttttcaattactgctcctactttccaggagcaacattttgattcttgtgatactaaatatgcaatttgaagtactgtactcgctttcatttcataatcaccagataagcagatttagcagtttcaacacgataaatttcgtgacgaagtttagttatacttttaataacagaactaattatattctgcccatctttaaagcggtttttcttatcaataaaaattgcgccaaccatctttttgtgaagctcaaccggatacttcgtcacaataatagcatcatacacagaaggatgaatactattcaccagagtatcattcattaaagttattctaatgaactttgctgtttcagagtcaagcgctctatgatcgccagtatcattttcaagacaattatcaattatatcagttaaattcatcatagtacgccatacaccctttgtgcttcaactaatccatcaaaatccaatttgagatgtgttatttggtcaccatcacctggattcacaattactaatactgaacgaggagtttcggtaataacacgaaccgatgtttcgggaaatcgttcagaaaccttatttactaattcctgcgcaaatagtttaactttttcttggaattctttaacagtaattggtttttcacttagcatgttgatcccagctccttactttcaacgtttttaactaatttgacagaaactaattcagcatcttgggtaatcattaccgggccttcttcatactcttcaagatattctagagctttctttttagcttcttcctttgtatcagtttgagcatagatataaaacatgcaaccagtaatacctactactttccacttaatttctttatcagttttaatttcaaatttactggcagaatcatctttttgaacttcttcgaaaaaagaatattctaacatataagcaattgaaaataacgggctaactttataggattcacccattacatcaacagctttataccaacaatcatcaatttcgcgtttaatgctaataacattctttgcagggtcaatttttactttaaatgaattttccccaataaactgggcgattcgtttattagccccgcaagtttcattaaaaatatctttatacccagttttaaagcgataaaccttatcttcttcaaaccattcgctcatttcaatttcctcatttgttttggtagagctataatatcacaactctaccgtaaagtaaaccattaaatcgctttgaattccgcagtttgagattcaaagcgaatgtcgcctttgataactagctcagcatcaagaccgaatacaacaatgatatgcgcggaacctggatacaacgtaatggcaatagaatccacctggtctggaagcaaagtgttcaatacatgagtcacttgagcgtggattcgaagctcagctgcgttatcaagtttttcaaacatattattagcgataatttggctaaacactacttctacgattttagagtaagtcggaaacatatttacctcacataattttcttcgagccaatcaataacatccaaagcgttatcaaaagttgcgccatctactttgtcttctgtttcataatcaagaacatctaggcctactcttccgtcaacaataggccatagacaaaatagatatttcttttctttttcaattttatcacaaagacgataaatcttttctaggttattcatacgttttccatggtaaaggcagtttagttttctttactactagttcaacatcaggattcttttctcttaatttaaggcattcctcccatgctctattttcactagtaaatacacaaaattgcccattactagtaccaactaaaccgctatttacaataacaatagcccaagtttcatggtgccaagccattaaaaatctcccgaagcgacttgccagcattcaacaccgatgcggcgccacatttcaactacttgagttcggtcatcaatagctaatttcacatcaaaatgtggtgcgatgtgtttccagaaaatttcttctttaaccacatcgtctttacgggtatcgccttgttcgcgttgacactgcatgactaatggaacaccagcaatgtcctcaacccatttacgggtcatacgataatatttcgttggatcttcttcggttccactttcacggcctgaaacgactacgatttgataacccataagagcatacatcttggatagttcaacgaccattggattaataatatcggtatcgcatttttcaaggtcataaggaccacgaccattcatttttgctaacgtgccatcaacatcaaaaataactgcttttggtttaccaggagtccctttatataccggaagaccgagatactctcgcatgcttttatacattgagcgtaaaacatcaattggtactgctttagttccgcgttttgagttacgtttaaccaattcagtccaaggaacatcaaacactttatattcaatttgatgcccaagctctttggcaaactcttcccaaaccttacgtcgttcaggattcagattagtatctgaaacaattacacccttcgttgcgtcttggcagagaatcatgttagcaacatcatgctgcatgtaagttacgataccttctttctttttggtatacttatactcgtcgcgttcttcatgacccatgatggattgacgataatcatcacgattaatattataaaaccctggatttttagcaataaattcgcgagcccaagtactcttaccagaaccaggacagccaatagtcaaaataatctttttcatcatttaattcctaagaaaacttcaagaatacgaatattgtgctcacgccgtcctttgtacaattcagctgttgattgattcgctgatttactctgaacattggatgaaataaattttatcatgtgatttttaagctgatacatatcaagcccacgagctttcgcttcttttcgcagggctttaccagcatcatctaaagctttagcagggtcttcatcatttaatactattccacgatccaaatccatgtatactgcaccatgacatgcatcaatgtaaaggtctgagcattcaatataacgttctagcagagttttcatttatttttctcaactaatgattgaatataatcatgcaggtctttagatgctttaccccacttattttgatattcatttttgagattagcacgggattgagctaataaaacatcattagttggaggtaaagattctaaccgctgaatctggcgtccataaatcattgcagccatctcggattcataaatcaatcctttgagatgttcaaattgatgccatgaaatcatttacatttatcctcttttaactcttgacgataataacatatcatagttttttggtcatgtacatatcgttttacatcattaagccaaatacgaaattcctgggaatcttcaaatggcataccgacccaagctttaccatcaataactttaacttgccaagatagtttagcttcatcatatgactttatctgtacaggccaattaggatgaactgtttctttctttacttctagaggctttgtcgaacaaccagctagaagaccgatagataatattactgctgatagtctaatcatttagaaaggtcctggatgtcttctgcgaacttgttgaaggagttgttgatttgtttttcaaccaatcctggcttacgagccaccacatccgccttctttgcatctttgcgcagtttttcattttcacgctcaatagcagcaatcgcctcacgatttttattattcatcgcatcaatataattatactgaattcgcaaattatttaatgctaaggcgttttcattggccgtttttgtaatttctacaacagacgtttctaatctttcaattttattttttaaaattaaagaagttccgcctaatgcaattacaattaatagcaaacctgctgtcgtattacttaattgcataaagttttaataacctctataatatcgtcttgagaaagaccgttaattaaaatatgatgttcagctggagatttagaaattttaaagcatgccgcaacatcttctgccatatccgatgcgctacgatttggattactaattccaagacgatgttttcccgttaaaggattaacgatgatatagcatttacagttgttaatatgaacattaggttgagtctgattaatgaacacatcgcaatcatatttcgcaagctgattttctaaaaagactttcatctcctcaaccgcatcaggaagcatatcacgggcttgctcaagacgacgatttcgatattctttaatggtcgttttccgcttgacttgcttagctaaatctttcttaagatcggtgatatatccaactcgacgatttcctttaaatacagaaatcccatctgtagtatcaccgtatgcttcaacgaccatttcagtagtaataagctgcaaatccatcataaagtcctcatgttatgtcagtaagactactataacacaacataaggaacgtgtaaacagcttagtatccttctgggataaattttttataatttttcaaaaaattctgttcgatttcgcacatgaccttttcttgactatcgtacccctgatataggctcataatgataccgaacaggtgatccattccagcacctttagcaacgccttgcgcttccatcgcataagtctttctatctttaccgcaatgcttattgtgacagtcaagaactaaaaacagagctcggtctaagtacttcagataagtcgtttcaaacgcctcaatttttctgtatgaatattcatcgtcagcgtacattgctttaagatcatctgatgcaccgtcaataatagtcttaaacaatttttctggattatctaatgaactttttgtactatgaagagacacgtaccagtcagacttaattttaaaatgagaaccatctttcatcacggcaacatagccttcgatgttttctgcatttttagcttcttcaacccatttagggctatcgatttcgtatcgttcaactagatatggacgaagaacagcatctttataaatatcatcatatgaaatgtattcgcctgtttcattttcacgaatattcaataaaatgattttcatttcttggtaagcaagaacgattctattcgtcggagcaacgaattcgaagttagcagtaaatccatcttcagctaattctttaagtctatcgcgcaaccgatggtgattaatattcatcaaaattccattagccattaaagcctgctcagatttgattgaaccctttgatttgaacagaatttcatcaccatctaaataagttgataccaaagacccgtcttcttttgttagaatgtaatcaacatcatttaaatcgatattcatcgtgaatggattttcattcaagttaaaaaacttttccatgggacgagaggcaattcttaccggtttttctccatccatttcaaacataattccacgacattccagtgcatctggaagtaaccaatcagaataagatgcataattatatgagaaaattctataagttcttccagatgcacttacatcatccgagtaaaaaaacttacgctgtgaatccttacatagttccattaaattgttaaaaagttcttgcattgtgtatcctcttttgtgttttgaatatagtaccacattccatgtggaagcatcattttttcttgtgttgaatattccaaggcgggttaaacagtttaatgaatagcggctcctctaggtcaatcgttgcgattgtcattgtacctaactcatttgtcatagaaagattaaaacattggcgggcgtaaaattcaactttgcttccttcctttagcgcagaatgaattaatgcagatttagtagaatcagacgttttgtctttacgattaatagcagttctataatagtttattcttttacgtaaatttttagtttttccaatataaacaagctcatcatttatagcaatagcataaattacgttatacttgtttggaatagataattgttttatacttccgttgtcgtctaattctagctcagtatatttaataaatgaatattctgttgcaatttctttcataataaaatgggccttgcggcccactccttaaaagtattttttaaaactcatcataactttatcatcaacatcattatcaatctgtgcaacaagataagatgacagttctacttcttgtggcgctgattgaacattatcagaattaagatattcacgaatccaaggatatggatgtttaaccggagcatcggcaattgggcatggaagaccacactgtttcatacgagatacagttaagtaatcaataaagctccacatgctatttgtatttaatccaggaacatcgccatctttaaataaatgaactgcccaatctttttcttggcggttaacttccatgaaaatatcaactgcttcttgctcgcactcttgagcaattttaacccattcatcgccatcagtaccagattgaagttgacgaataatatattgtgtacctttaagatgaagctgctcatcacgtgcaatgaacttcataatcttggcattaccttccatgatttccatgtttttatggaagttaaaggtacacgcaaaggatacataaaaacgaatagcttctaatgcattaataacgtgcaaacagaggtaaagagatttcattagctcacgcttccaatatgtctcatgctcaatagcatcttcaataacgtcttcgtctgcattaatttctttttggtattcgatatcagctttagcgttttcccaataacgagttttaatcagaacatcatcataataacgtccaatggattcagcacgtttcataatagcttcatctaatacaatttcatcaaataccttcgatggatcagtataaagatttcgcatgatatgagtatatgaacgactgtgaatagtttcactaaaagtccatgtagcaacccatgtatcaaggcttgggtctgaaattaatgacataagtacagcagatggcgcgcgaccctgaatgctatctaaaagtgattgatacttcaagttgttagtaaaaatattttgctgatactgaggaagcttattaaactgtgcagcatccatcatcaagtttacttcttcaggacgccagaaaaatgataattgcttttcggttaaatcttcaaaaactttatgacgttgaatatcataacgcgcaataccaagacctgaaccaaaaaacataggttcttttaaaacatcaactggatttgtattaaaaactgtgctcataaattttccgcttagttaatagttggtgactcgtccgtgagtcaaattatatcataatttacaggatgaacaatcttcagcttttagagtttctatttcataatcatcagtaccagaaccatcacgggtattatgataatagaaattttttccgccaaaataccaaaaatacaaaaggtcatcaatcattattgacattggaacctttccttttggaaaaatctgcgggtcataatatgtattcgctgaagctgattgacatacccatttcagcataatagctacctgcgtaagataaggtttattacctttcttagctaatttccacgtataatcatataggtctatgttatgttcaatattgggcacgacttgattaaaggaaccctcttttgattctttaacagagactggtccacgtggaggctcgataccgtttgtactgttagaaacttgggaagatgactcacatggcataagtgctgataatgtgctgttacggatgccaaagagcttaaggtcttcccgcagcgccgaccagtcacaaacgtattttggagctgcgatttggtcaatctttttattgtaccagtcgataggtaattcgcctcgagaccaacgagtgtctgaataatattcgcaaggtcctttttctttggcgagcttaatggatgctttaatgagtccatactgtaatctctcaaatagttcatgtgttaaatcgttagcatcttcataagaagcaaagttacttgccagccaagctgcatagttagtaacacctacaccaaggtttcgacgctttttagctttttctgcttcaggaactggatatccttggtaatccaacagattatcaagagcacgaacttgaacttctgccaattcattaattttatcttggtcttgccagtcaaaattatctagtacgaatgcagagagagtacacaatccaatttcagcatcaggactattcacatcatttgttggaatagcaatttcacagcacaagttactctgacgaataggcgccttttcacgaataaacggagtatagttattcgtattatcaatgaactgcacataaatccttgcggttcctgaacgttcagtcatgagcaattcaaatagttcacgggctttaatacgctttttacgaatattagggtctttttctgctgcttcgtataattcacggaaacggttttggtctttaaaataagaataataaagttcgccacccatttcatgcggactgaacaaagtaatgtaatcattctttccgaatcgttccatcattaggtcattcagttgaacgccataatccatatgacggatacggttttcttctacgcctttgttatttttcaaaacgagaagattttcaacttccaaatgccaaataggataataagcagtagcagcgccgccacgaattccaccctgtgagcatgatttaactgcagtctgaaaatgtttccaaaaaggaataacaccagtatggcgtacttcacccatgccaatcttagaaccttcagcacgaatcataccaacgttaataccaattccagcgcgtttagagatatattcaacaattgaagcggaagccttgttgatagactttaatgaatcacctgcctcaataacaacacatgaactaaactgtcgagtcggagtacgacaaccagccataataggagttggtaatgaaatctgtcgagtagatactgcttcataaaaacgaataacgtgttttaatctatcaacaggttcatcttgatgcaaggccattccaatagtcataaatgcaaactgtggagtttcataaatttgaccagtggttttatctttaactagatatttttcttttaattgcatcgccccggaataagtaaattccatatcccgttcgtgcttaatttttgattctaaaaatgtaatttcttctgctgaatattttgacaacagttcagggtcgtatttaccttcatttacacagtaagaaatatggtcaataaatgaacgcggttcatactgcccataaacatgcttacgaagagcgaacattagacaacgtgcagctacatattgataatcaggctcttcaaccgaaatagaattcgcagcggccttaatgacaatagtctgaatatcatcagttgtcattccatcacggagataagatttaatattttcatataattcataaggatctactgatgttccctcagctgcccaagataaaactttaataattttttgtgggtcaaagctctgagaaacaccactacttttgataacattaattaattgcataagtcctcaacttgaaaatcgtctttaaacaatcggttaactatatgagctattatatcaccatgacacggctttggtttacatgtgcatcctagcctcattccacgtaaaggctctaaatgtgctttagttatttctccggatttaattcgacgtataaaatcttttttgaataattcaatggcagcctcccggctgccagcatctttaccgacgtaatttccccaaaatgtaccacggtgaatattcacatcaaagtcggatttgtatttattcactacccgacatagacggcccgcgcggtgataattcggcatattgtttttccgttaaaacagtaatatcgtagtaacagtcagaagaagttttaactgtggaaattttattatcaaaatactcacgagtcattttatgagtataatattttttgccataaatgataataggctgatttggtcctggaacttctaactcacttgggttaggaagtgtaaaaagaactacaccagaagtatctttaaatcgtaaaatcataaatcctcacaattaaattaaaattacaccgccatttttcctttcaagacgccgtgggactgataatctttgagaacgaaatctttaggcctgagtttaagaatgtattccaattgttctttagtagaaagatagcggaatttataaggcaatccgcctattaccagttcacaaagctctttaggttcacgacgcaaaatttctttacattgttctacgtgattcatatagatatgagtattaccaccggaaaatatcaaatctcccggaataagattacacatcttagctacaatatgaactaacgtagcatatgatgcaatattaaatggaagcattatgttcagataaggtcgttaatcttaccccggaattatatccagctgcatgtcaccatgcagatcagactatatctccaacttgttaaagcaagttgtctatcgtttcgagtcacttgaccctactccccaaagggatagtcgttaggcatttatgtagaaccaattccatttatcagattttacacgataagtaactaatccagacgaaattttaaaatgtctagctgcatctgctgcacaatcaaaaataaccccatcacatgaaatctttttaatattactaggctttttacctttcatcttttctgatattttagatttagttatgtctgaatgcttatgattaaagaatgaattattttcacctgaacgatttctgcatttactacaagtataagcagaagtttgtatgcgaacaccgcacttacaaaacttatgggtttctggattccaacgcccgtttttacttccgggtttactgtaaagagctttccgaccatcaggtccaagtttaagcatcttagctttaacagtttcagaacgtttcttaataatttcttcttttaatggatgcgtagaacatgtatcaccaaacgttgcgtcagcaatattgtatccattaattttagaattaagctctttaatccaaaaattttctcgttcaataatcaaatctttctcatatggaatttcttccaaaatagaacattcaaacacattaccatgtttgttaaaagacctctgaagctttatagaagaatggcatcctttttctaaatctttaaaatgcctcttccatctcttttcaaaatctttagcacttcctacatatactttattgtttaaagtatttttaatctgataaattccgcttttcataaatacctctttaaatatagaagtatttattaaagggcagtcctacaatttagcacgggattgtctactagagaggttccccgtttagatagattacaagtataagtcaccttatactcaggcctcaattaacccaagaaaacatctactgatcgttgataccactgcaaatccaaatagccattacgcacattaaactgatagaacatatgacaaggtggtaatgccatctgcttgagttcagctggattccatgctgaaacaatttgacgcctatcatttggcagttttttaatacgatcaataacttctataatttggtctacaccaccaaaatcacgccactgttttccataaattggaccaagttcaccgctatggtatcctaaatcttttgcttgattttcgtaattttcatcccaaactgttttgccttggattaacgaatcatgttgaattaatcgcaaatcattgacatttgtgcttcccgataaaaaccaaagcagctcagcaatgcaagctttccaggcgagcttcttagttgttactgcaggaaaacctttagttaaatcccagcgtaatttagtaccgaacaaagcaattgttcctgtgcctgttcggtcatcggtttcgtagccattttcaaaaatgtctttaattaaatcttggtattgtttcatttagtaccttatataaattataatacattttatgaagctaaataatcaatacggtttagcatcaaattttctctcaatttcaggtgtgaaatataattctttaccacgtttggaaaagcgaccaataatatgataattattctcatcaaacatgatattaccaatatccatagctttcaaccaaatatcgatatttctatccagctttatgtcaaaattccaatacagagaactattaccgaaaatactgcaagcggattcagtgaaacaactgctataaatcttgtctttaggaactactaattgatagacacctttaataaactgaggaccctgccactttggctgtttcgtgtctttttctaatagaatagggtaataattaaaattcatatttccgccacgcgttatttcatttatatactgattccgtaagggttgttacttcatctattttataccaatgcgtttcaaccatttcacgcttgcttatatcatcaagaaaacttgcgtctaattgaaccgttgaattaacacgatgccttttaacaatgcgggaaacaactacttcatccgcataaggtaacgcagcatataacagagcaggcccgccaattacacttactttggaattctgatcaagcatagtctcgaatggtgcgttagggcttgacacttgaatttcgccgccagaaatgtaagttatatactgttcccatgtaatatagaaatgtgctaaatcgccgtctttagttacaggataatcacgcgcaaggtcacacaccacaatatggctacgaccgggaagtaatgtagataatgactggaacgttttagcacccataatcaaaattgtaccttctgtacgagctttaaaattctggaggtcctttttaattcgtccccatggtaaaccatcacctaaaccgaatgctaattcattaaagccttcgaccgttttagttggagaataagcgaataccaatttaatcattacgcaaaacctctttcaacaaaccattcagtggctttattagcatcaaagaataattcttcataggtcttttctttgttttcaaagactgtcacacaaacacgttgacattctccacagtattcttctgacatactcaaagcgtcagaaaacatttcattaaattcacttaaatcaggattatgcaatgcgttaaaaattgcataatcaaattcatcattcataaattcaaatacaaaaatcatattacctcccactgaaaggggccagaagcaaatccgctatctttaatcattttaactaaagttaccattcctctgttaactgcttgtgcgatttcatcaaaaacttcatcactatcatcgtaaaggtcattaaaaagttctaatacgttcttctgaacttttaatttacagccaacaaattcgcctacagtaaattcgtttccgccaaatccagcgtaaaatgtaattacacctgttaactgtctttcactagaacataggtcgtgtgataaattaatataagccgtcccaggtgcagttttaagttggcaacgaatacttactcgagcaattccagctacacgaatgtcagacatattattttcctcaaacagactttttcacaattttccaatcagctttaaactgctcgacgtcagaatggtaaatccaaaatcctgcgctttctccatcctcataaagagggcatccatcacattcatcttcccaccccatatcgcgtaaaaggcgttcagctttttcaacaagttcagaatctttaccgatgatattaaaataccatttacctctaacttctgaatctttgatactctgacgttgtaatctcattttattctccttagcaagctttaatcaaaagatataaacagaccaacataactgctgccataatataaggtgcgaacattttcttttctccattagttttgatagggtaatagtatcacactactaccctgatgtaaactactttttgaaagtttttcgcaaaagttcaatgatttcatctacattgttttcgtcaacaatgcagtgaatttttgttacgccagaaaccttgtctttgacttcatcctcttcagaagtcggttctttatattcgcggaaacaataaaactcttcttcactaagttcaaaataatcatcacccataccatcatcattatagatttcaccattagcacaaatgatttcggttacataatcaaagccatctaaacttgatattgatttaacttcaaaccaaccgccattttcttgaatgatgccgaccatactagcatttgatgaactaatatcaatgaaagatttaatacgatgtggatttaactcgtattttttgccgatttccattttgattttcctcattttaataggggcttaatagccccttgataattattgttcaatcagtcccatgtaaaattctacgtcttcagcatccataccatcgcagtattcattagccataaaccgctcaagaacttctaaaggaccttcaataacgatttgaatactccaaaacttagaatcttgtacacttgtgatactaagttcaggataacgattacgaataatttcttcaatatattcaaaatcaacgatgtcaatatcaactttagccatattattttcctctttaattatcagcagtattgccgatagttgtatagtaccatggaaggacaaggatgtaaaccgttttatgaaaaatttttgaaataaaaaaggggacctctagggtccccaattaattagtaatataatctattaaaggtcattcaaaaggtcatccaggtctgtgtcatcagcactagatgaactgccagagcttgagctcataaaatcatcttcagtttttgtattgaagtcatcaacattgaatgcatccaaatcatcagcaactttatcagctttcttagcggcagtcgctgcagcaccgcccatcacagcagttcccataacttgaccgaatttagtgctcagttcttcaaacgatttgaatttatctttagaagtcatttcagaaaggtcaaccatttgttcgaacagttctttctggaaagattcatcgtcaatgtttggaatcgcagattgattcaggaatttagattcgtcgtagttactaaatccagaaacctgtttaactttcagtacaaagttagcaccttcccatggacaagttacatcaaccggagtttcacccatttcaacatcaaccgcaatcatcgcgttgattttatcccagattttcttaccgaaacgatatttaaatactttaccttcattttctggagcagctgggtcttttacaacaagaatattagcccagtaagaagttttacgtttaacaagactgtactctttattgtcagtgttgtacagatcatttttactgatgtactgacatactggacaagaatcgtaatcaccgtgggtagatgaacagttttcaatataccatttaccatttttcttgaaaccgtgatttacaagaattgcgaatggtgcttgttcatcatttttagacggaagaaaacgaattactgcttgaccgttacccgcattgtcgagtttcagtttccactcgcctttatcttcagaagaaaaaccacctttatttccagccagtttagccatttgtgcagcgagttcagcagtagatttacgtttaaacatttttatttcctttttaatttaattaacagttggtgctatgacgatgtatgacctcatagctggtcagtgagataattataatctatttataataagcaattaatacttgcaagatttcacagtttcaatgaaaacatttttagctttctgtgaatcaatatttaaaatttttctataagcctttaactttatagaataattattccagactaaattatcagtctgttcatcgtgtttatcaattatatttaaaaacgaatcaagcaagataaacgtttcaaacgaaattatattcgattgaagtagtttaaaaatataacttgattgaacttttggattatactcaaagatttctttaaaagcagaaacttcaacttttttactaaaatagtaaatattgcgaatatcttcttcaaacttaaatttaatttgctttaagcgtccgatatattcacgataaaacacaagtgcatcagcgtcagagatgtcgccaatccaagcatcttggttagcaacaagattgcttataaagattaaagcaagttcctttaatttatatttttctgataacttctggaaaaaatacttatcccttcgcttttgataagcggcatcagacacccgcatgcaccaattatacttaattacatcatactttccattcatatgctgttttatcattaagtataatttataaactgatttaccatcaatatatctttcaccaccagcaggcatgcggagtttaatcatagtagaaaatctaatgtattagttttttcacaacgaacaacagaaggacgtaaaagattttcgtcaatggcttctgactgaattttttcaattatacccgaaggaataaatttagcaaattgagtttcaggaatagagttttcttctaagaatgctgttgtagcttcaagataactcattccaaactcttctaccattttttcaataataaatccattttcttgacgatcaagaagctttgctatttcatccttttctttcttaattgaaagttctttttctgaaagaccggtctcatcgaccggacgaatatcatttagagaaaactgtgtcataaagttcaactacctcttcagtttcagcttcaaacacatcacggttatctttatgatacaaagctaatagacgattaaacatcttaccatcaacgccaagttcatctttggcacgaattcgaatatctttaatcaattcattataaccggaaattttcagtttatgatcagatgcttctttaataaatttagccaagtcttcgccatggatagcttcatcaaattcaaccatttcttttttagccattattcacctcaaaattcattaatgctattagttaatttagaaagacccgcttttacaaaatatgaataaattttgccacgcggtggtaatttatatgaattatagtaattcacaatgtttgaagcaatattatcaggaatataatcaaaatcaattagaactaaattttctttataacgattatactcagattctgagagaagcaccttagcttgctcacggtcattagcaatagcttcaacgattgaagttttcattgaaggagttcgttcaccttcaactctggtaaaccaaaagtcagatcgtactttaactgaagcaacattatcctttttgtcacccttaagaattttagtcatacaatcaatttcagcagaaccgcttttaattttaacccatttcttatgcatcggtgaccattgcttaacatttggatatttgtgaagctgtgtaaagtcaccatccgatgaaatgattaaaatcttatgtccttctaaagagaactttttaacaagaacagcaatgtggtcatctgcttcatacttatcaatatccataacaatgtatggcatataagctttcaattcatctataactttatgactggattcaaaataaccttcccagtcccaagtagattcttctcgtgcttttccacggtttttcttataataataagcgaaatcacgacgccagtatccagatttcgcgttatcaatacacagtacaattttagtgtatccaagcgtttttgcttttttgacattaaacttaattgagttcaatatcaaatgacgaaccattgataaattaattttttctttatctgggaagtttaccagagcagttgaaagagcaatttgactaaagtcaataaagcaaattccttctttgtaatcttcatccagcatcatttctaaatccatatgaacctcgttcaattagtgagatttctattatatactatctaaatcttaaagtaaacaggtataaatacttattattgaaaacacaataggagcccgggagaatggccgagattaaaagaaagttcagagcagaagatggtctggacgcaggtggcgataaaataatcaacgtagctttagctgatcgtaccgtaggaactgacggtgttaacgttgattacttaattcaagaaaacacagttcagcaatatgatccaactcgtggatatttaaaagattttgtaatcatttataataatcgtttttgggcagcaacggataatattccaaaacctgctggaaattttaatagaattcgttggaaagcattacgtactgatgccgtatatacaactgtatcatctggaccatatcaattaaaatccggagaagcaatttcagtagatacatcagttggcaatgacattgagtttactttaccaccttctccgcttgatggagaaaccgtaataattcaagatatcggtggaaaacctggcataaatcaggttaaaataaattcttcaaatcagagtattgtcaattttagaggtgaacaggtacgttcagttttaatgactcatccaaagtcacagatggtattcatttttaataatcgtttgtggcaaatgtatattgctgattatagcagagaagctgcgattgttactccatcgactgcgtatcaagcacaatctaatgattttatcgtacgtagatttacttctgctgcaccaattaatgttaaacttccgagatttgctaatcatggcgatattattaatttcgttgatttagataaactgaatccactttatcatacaattgttacgacatatgatgaaacaacgtcagtgcaagaagttggaactcattccattgaaggccgtacatcgattgacggtttcttgatgtttgacgataatgagaaattgtggagattgtttgacggggatagtaaagcacgtttacgcattataacaactaattcaaatattcgtccaaatgaagaagtcatggtatttggcgcgaataatggaacaacccaaacaattgaacttcagcttccgactgatatttctgttggtgatactgttaaaatttccatgaattacatgagaaaaggacaaacagttaaaatcaaagctgctggtgaagataaaattgcttcttcagttcaattgctgcaattcccaaaacgttcagaatatccgcctgaagctgaatgggtaacagttcaagaattagtttttaacggtgaaactaattatgttccagttttacaacttgcttatatagaagattctgatggaaaatactgggttgtacagcaaaacgttccaactgtagaaagagtagactctttaaatgcttctactagagcaagattaggcgtaattgctttagctacgcaagctcaagcaaatgctgatttagaaaattctccgcaaaaagaattggcaattactccagaaacgttagctaatcgtactgctacagaaactcgcagaggtatcgcaagaatagcaactactgctcaagtaaatcagaacactacattctcttttgctgatgaccttatcatcactcctaaaaagctgaatgaaagaactgctacagaaactcgcagaggtgttgctgaaattgctacgcagcaggaaactaatacaggtatcgatgatactacaatcatcactcctaaaaagcttcaagctcgtcaaggttctgaaacattatcgggtattgtaacttttgtatctaccgcaggagctactccagcttctagtcgtgaattaaatggtacgaatgtttataataaaaacactaataatttagttgtttcacctaaagctttggatcagtataaagctactccaacgcaacaaggcgcagtaattttagcagttgaaagtgaagtaattgctggacaaagccaagaaggatgggcaaatgcggttgtaacgccagaaacgttacataaaaagacatcaactgatggaagaattggtttaattgaaattgctacgcaaagtgaagttaatacaggaactgactatactcgtgcagtcactcctaaaactttaaatgaccgtagagcaactgaaagtttaagtggtatagctgaaattgctacacaggttgaattcgacgcaggcgtcgacgatactcgtatctctacaccattaaaaattaaaaccagatttaatagtactgatcgtacttctgttgttgctctatctggattagttgaatcaggaactctctgggaccattatacccttaatattcttgaagcaaatgagacacagcgtggtacacttcgtgtagctacacaagttgaagctgctgcaggaacattagataatgttttaataactcctaaaaagcttttaggtactaaatctactgaagcacaggaaggtgtcattaaagttgcaactcagtctgaaactgtggctggaacgtcagcaaatactgctgtatctccaaaaaatttaaaatggattgtgcagagtgaacctacttgggcagctactactgcaataagaggttttgttaaaacttcatctggttcaattacattcgttggtaatgatacggtaggttcaacacagccattagaatcatatgagaaaaatggttatgcagtatcaccatatgaattaaatcgcgtattagcaaattatttgccattaaaagcaaaagctgtagatagtaatttattagatggtctagattcgctccagttcattcgtagggacattgcacaaacagttaatggttcactaaccttaacccaacaaacgaatctgagtgcccctcttgtatcatctagtactgctacattcggtggatcagtttcagcaaatagtacattaactatttctaatactggaacggcaactcgtctgatttttgagaaaggacctcaaactggaacaaacccggctcaaacgatgacagtcagagtgtggggaaatcaatttagcggggaatcagacacaacacgttctaccgtatttgaagttagtgatgaaacgtctagtcatttttattctcagcgtaataaagctggaaatataacatttaatatcaacggtacagtaacaccgataaatgttaatgcttcaggaacattgaatgcaaatggtgtagcaacatttggtaattcagtcactgcaactggtgaaattatttctcgaagcgcaaatgctttccgtgctattagcggaaattatggtttcattgttcgcaatgacgggtcagtaacgaattttatgcttactgcatcgggtgatcaaactggcggatttaatggattgcgtcctttagctattaataatgcatctggccaagtaacgattggtgaaagcttaatcattgcaaaaggtgctactataagttcgggtggtttgactgttaactcgagaattcgttctcagggtactaaaacctctgatttatatacccgtgcgccaacatctgatacagtaggattctggtcaatcgatattaatgattcagccacttataaccagttcccgggttattttaaaatggttgaaaaaactaatgaagtgactggacttccatacttagaacgtggtgaagaagttaaatctcctggtacattgactcagtttggtaacacacttgattcactttaccaagattggattacttatccaacgaccccagaagcacgtaccactcgctggacacgtacatggcagaaaaccaaaaactcttggtcaagttttgttcaggtatttgacggaggtaaccctcctcaaccttcagatataggagcgatcccatctgataatggaataataggtaatcttactattcgcgatttcttgcgaattggtaatgttcgcattattcctgacccagtgaataaaactgttaaatttgaatgggttgaataagaggtattatggaaaaatttatggcagagtttggacaaggatatgtccaaacgccatttttatcggaaagcaattcagtaagatataaaataagcatagcgggttcttgcccgctttctaccgcaggaccgtatgttaaatttcaggataatcccattggaaatcaaacatttagtgcaggtcttcatttaagagtttttgacccttctacgggagcattagttgatagtaagtcatatgctttttctgcttcaaacaatacaacatctgccgcttttgtcagtttcatgaattctttgtcaaacaatagacttgttgctatattaactagcggaaaggttaattttcctcctgaagtggtatcttggttaaggggagcaggaacttcagtttttccatcagattcagtattgtcaagatttgacgtgtcatatgctgctttttatacttcttctaaaagagctattgcattagagcatgttaaactaagtaatagaaaaagcacagatgattatcaaactattttagatgttgtatttgatagtttagaagacgtcggagctacaggatttcctaaaagaacatacgaaagcgttgagcaatttatgtctgcggttggaggaactaataatgaaattgcgcgattgccaacttcagctgctataagtaaactttctgactacaatttaattcctggtgatgttctttatcttaaagcacaactatatgctgatgctgatttacttgatcttggaactacaaatatatctattcgtttttatgatgcatcaaatggatatatttcctcgacccaagctgagtttactgggcaagctgggtcttgggaattaaaagaagattatgtagttgttcctgaaaatgcagtaggatttacgatatatgcacaaagaactgctcaagcaggtcaaggcggcatgagaaatttaagtttttctgaagtatcaagaaatggcggcatttcaaaacctgccgaatttggcgtcaacggtattcgcgttaattatgtctgtgaatcggcttcacctccagatataatggtacttcctacacaagcctcttctaaaactggcaaagtgtttggacaggaatttagagaagtttaaactgagggagccttcgggttcccttttttctttataaataatattaaaataaaggggcatataatggctgatttaaaagtaggttcaactgtgggtggatctgtcatttggcatcaaggaaattttccattgaattcagccggtgacgatgtactctacaaatcatttaaaatatattcagaatataataaaccgcaggcagctgataacgatttcgtttctaaagctaatggtggtacttacaccggtccaattactattaattacggggtaaatagttatcttcaattaagtaataatgaaacccccatccgaattcgttctggtggcggcactggtaatactcttgtagttggtggctcttctggcggtattagttttagaccagcaggtagtgaaatcactactggacaaattacgattacgccagaaggtttgacaacatttaccaaagctgtaacggctccatctgtaactgttacatctactccttccgcagcatctgatgttactcgtaaagattatgttgatggagcaataaatactgttacagcaaatgcaaactctagggtattacgctctggagacactatgacaggaaatttaactgcgccaaaccttttttcacagaatcctgcatctcaaccttcacacgttccacgatttgaccaaatcgtaatgaaggattctgttcaagatttcggctattattaagaggacttatggctactttaaaacaaatacaatttaaaagaagcaaaactgcaggtcaacgtcctgctgcttcagtattagccgaaggtgaattggctataaacttaaaagataaaacaattttcacaaaagatgactcaggtagtgttatagaattaggtttaaaatatggaggaactataaatgggtctttagaggttacagaaaatataactggaactttaattggaaattctagcacagctactaaattgcaaacacctaggaaaattaatggtatatcttttgatgggtcaaaggacattaccttaactccatctgacataaatgtcaatagcacaacatttataaaaaataatggcgaattacctactgatgctaatttagatacgtatgggcccattgaagaatatcttggtgtttggtcgaaatctacttcaacaaatgcgcaaccagcaaataaattcccagaagaaaatgccgtaggtgtactagaagtatttgtggccggccaatttgctggcactcagcgttatactgtaagatctggtaacgtctatattcgttccttatctgctaaatggaatggcgtcgatggtccatggggtgtgtggcgtaatgttcaagcgtcaactcgtccactttcacaaacgattgaccttgatagcttgggagaattagaacattgtggcttatggagaaacagttcaagcgcaatcgcatcatttgatcgccattatccagaagaaggatcagccgcacaaggatttttagaaatatttgaaggtggtttatacacaagaacgcagcgttatactacccgcatgggtatggtttatactcgttgtctcgctgctgcatgggatgctagtgcacctaagtgggaggaatggaagcaggttggtcatggcacaccagcgactttctatgatggagatctgaatgattttaaaactcctgggttatataacattttaggcactgatgccgttattaactgtcctactggtgaaggtttaccagccgttattgttggtttgctggaagttaaacagcgtgcttctggtggtgctattttccaaaaatttactactgccggaacgggtgcaactactcgcgatcgtatttttgagcgtgcatatactggtggtgcgtggggtgcatggaacgaagtatatacatcttattctcttccaattactttgggtatgggtggtattaaagctcaattagcggagttagattggcaaacatttgattttgttcctggtagtatgtttagcgttcctttgaacaaaataaagaacatgccagcaaatatggattgggggacgattgacggaaacctggttatgttttccgttggtcctagcgaacacactagcacagggcgtactgttcaggtttggcgcggtactgtatcccagacaaactaccgttattttgtcgttcgtgtgttcggtaattctggaaatagaacttgcacagtccgccgtgttgttcttgaagatggtcgccacacatggacagctcaacaagattttaatggtgctgttaacttcggtgctcctaccaattttaactctactgttaaccttaataacactaccacatttaaaacagaagttaaattccgctcatctaatgcattccgtatgtatggcggaaaatttggtacaattttccgtaatgatggagagagtctttatattctttccaccgacgaaaatgatcaagatggaaactttaatacaaatagacctttccgctatcaattaaaaactggcgatgttactttgggtggcactagcggtgctaacgctttagtattaaaaggcggttctcttgctgctacctttagcggtgatgttaatttaagtaaaggtacgctgacgtttgaagcgggtggtaagcaatcacgtgattatttccggtttaatcattggggtgatagcaataacgctcgtgataacattattcagttagaagacagcaaaggcgctcatttttcaactgaacgtactttagctacgggtgcaatcaaaactaagttctttggtgaagttgaatccgaaggtcgattgactattaaacgtcctggtgatgcgattgtattatcaacaactgctggtaatgctttgcatattcgcggtgacatagacgggactggtaactggtatattggcaagggtggtgctgataattcgctagcattttatagctatgctactcaggcggcagtacatatcacaaacaatggtgagatttcgctaaatccacaaaatatcgcaatggttaacgttaaccgcgatcgtgtacacattaacggttctggatggattgctagacaaccgggtgattggggcaaccaatggcgagtagaagctccattattcgtcgatcatggttatgtttcacaggattgttattatccaattattaaaggaaaaagtgtaatcaccaatcaagggtttataactgccgtcgatcttggtattcgtcgtgtccctaacaattgggggcaagcaattattcgtgttggatctgcagaggcatcgccagcggctggacaccctaacgcggtatttgaatttcattacgacggtactttctattctcctggtaatggtaactttaacgatgtgtatattcgttccgatggtcgtcttaagattaataaaaaagagctagaaaacggagcacttgaaaaagtatgccgactgaaagtttatatttacgataaggttaagtctattaaagaccgtagtgttattaaacgcgaagttggtattattgctcaggaccttgaaaaggaattaccggaagctgtgtctaaagttgaagttgatggttctgatgttctgacaatttctaactccgctgtaaatgctcttttaattaaggctatccaagaaatgagcgaagaaattaaagaattaaaaacgcctttcttcactaaaattgctcgcaaaattagtaattattttaaattctaacaacaaggggctttgcccctttggagataattatggcagtagttggtgttcccggttggattggaagttcatccgtaaatgaaacgggtcagcgctggatgagtcaagcggctggtcaattaagattgggtgttccttgctggatgagtcaatttgcaggtcgctcacgagaaattattcacacgcttggagcagaccataacttcaatggtcaatggttccgagatagatgttttgaggcaggtaatgcacctatagtgtttaatattacaggtgatttagtatcatattctaaagatgttcctttattcttcatgtacggagatacaccaaatgaatatgttcagttaaatattattggcgctcatatgtggggtagaggtggacaaggtggatggactcattccggtggagatggtaatggacaacaaggcgggcattgtattcaaaatgacatcggtggacgattaagaattaataacggtggagtaatctgtggtggcggaggcggtggtggcggcattgcttaccgtgttcactcaggggcaaactggcaagatattggtggtggcggcggaagaccatttggcccaggtggtggcggtggttactcaggtggcgcagcttcatacgtcgccccaggaggtggttaccaatacggaaatgctcactctggccagggcggcgatgccggaggaaatggacaaaatgcctggtctgatggtggtaaagttctaaaggttggtgcaggaggagcagcaggttatgctgtcataggatctgctccaacttggcaaaatgttggagtaatatatggtccaagagtataattttgaataaatacccctaaaaggagggtctatggcagcacctagaatatcattttcgccctctgatattctatttggtgttctagatcgcttgttcaaagataacgctaccgggaaagttcttgcttcccgggtagctgtcgtaattcttttatttatgatggcgattgtttggtataggggagatagtttctttgagtactataagcaatcaaagtatgaaacatacagtgaaattattgaaaaggaaagaaatgcacgctttgaatctgtcgccctggaacaactccagatagttcatatatcatctgaggcagactttagtgcggtgtattctttccgccctaaaaacttaaactattttgttgatattatagcatatgaaggaaaattaccttcaacaataagtgaaaaatcacttggaggatatcctgttgataaaactatggatgaatatacagttcatttaaatggacgtcattattattccgactcaaaatttgcttttttaccaactaaaaagcctactcccgaaataaactacatgtacagttgtccatattttaatttggataatatctatgctggaacgataaccatgtactggtatagaaatgatcatataagtaatgaccgccttgaatcaatatgtgctcaggcggccagaatattaggaagggctaaataattatttgttcgtatacatttctagatatcgatatacactctcaaaaccctcgttgaattcgtcgatgagggttttcttatcttcttgagttaattcagaaacaattttacggaatgaattctgatttaactttctaccttcatgcgttactccaatctcattaagaaatgcaataaaattagcacgattctcaacaatatcttctctggaaaatttaatcaaaatagatgcaacagtaataatttcacgaactgtatcaatgtttttattcattaactataccactcaattagttgactttgttataatatcatcagacgcttgatttgtaaaccggtctgtgttattttcttcaaaaattttttctacgaattccttgaacgactcacgttcctgagctacattatgctcgattaccttttcaagattatgactcattcgaaataatcttcaatttcataatcatggacataaatcattatagtttttaatacatcatcaatactttttcctggagctggaattacgtaaaaatatcctgcttttgagttatctttataagttccaatcaagaaatcattattcccaagatgtagttcttcaactaattcattaacaattgagtgatataaatttggtagaaacttgtatagcttttctagaatatcaattttgattgtgtattgaaccacagattgagaatcaataatcatagaccttccccttatgtttctgtttgcgattagattctttaaacgctttcttcttatccttatgaacagaagctttattaaaattatgctttgcgactaaattgttcatagtgctgaattacctctcttaaacatttgcatgtgaatgaaaactttttagctacaccacattcaaatatatgttctcttaaatcgcgtgtatcggtatatcccatctcaacaataaaatgccgtattagatttttatctttatcgttgagagaattaaaataatcggattttgaattaatttccctggccaaattgaatcaccttcagttgacgttttaattcttttatcatctcttcgttcattgcaatataaagatcgcgtagagcaggttttagcattccatttactggataactaaatggacatacataatcttttcctacgagctttttagtgaattccatatcacagaactgaaatgccggttcatttgtataaattccccaattagttgacatcattttattggcatattccaacgcctggatttgattcttaattccatcaatttgaaactttttaatattcattagtaaaggtcctcagagtaaagttctttttcactaccaccacgttcaatacgcacttgtccagcgtaagttgcaataatcattgcttcttcacgtgtccagtaattgctatactggtcaataaatccttggtcttcaccacaaacatggtctgatacaagtttatcacttacctggtcaagaacttcagccatatctttagaataatgacgagcaccaggaataaccagagtcccaccatcttttaacttaaagcggttggctgcacacacaattcgacgttgatatttttcattattgttccaatgagctacttgccaacagatttcaggaacctcttctaaaacatcctcttccgtatattcggtgtagtcgccataggcctgtaatttagctgctagactttctggagtttcacgtaataaagccaggtctaataattcaagacgctctttgaaggttttcatttggtttcctcaacacttttaatttttatagcttgtttagaactttcaaagcattgacaatatactcttaccgcatcaaactggttggccgctttaagatggactacaccttcgccgttataaaattctacgacaattttaaatgttttcatttaaaccatcctttaatacgttgccataaagttttctgttgagctttgttaacaccaattgaacgaataactggttgagattcctgaaattctttataatcagcaaggtaaatttcgtaagctgcatccgtaaatgaacttatcgctgccataaaattattgcgaatacctactggagcatctttactttcacgaataatcatgtatttaccagtcttaatctttacgatagttccaagataagctccatggtaccagatgtcccaaccctcttgagtaggttctacacaacgacgaagttcattgacaatttctaacttgttcattatttattcctcacagttcagatgctacagtgattacggcttcaatgttttctgccgagcgtttaatgtcaagatacacattaccgtttttagcgattttacatgacattccgatatcagtaaatttctgaatatggtgttccatcattttgtatccaaaaattcgcatatttccattgttattaatttcaaaattacgaattccgtgagtgcgtttttctaaaatagcaagatagttactgcggtaagtttcaacctttttaagaacaaatccattttcatctaaaagttttagcataaggtctttatcttcttccatatcggaagtaatctcacgagctttacgagttgctcgttttttcagcagttccggagcgttttcctgtgcgtataaagttgctgcatttgaaataatatcctgagcttcaccagtaatgattaatccatcaccagatttctccaccaggccttttttaatcaataccccaatattactattaactactgcgttacctaaatctggatgcacctcacgaacttctgcagctgtaatgaaatctttcttagcaatggtaattaaaatcgcagcagttttttcattcagaacatcgttagaagctttgatgatgtaagttactttagacattttaatctccgtttcagttcatttatttgataggtctatagtatcatgtttaaagcagaagtaaacacttttttgcactctttttcaagagctctaataaagtacttacttaatgttcagattacgaacttcgatttcgtcttcatgggcaaaatcaaactgtttgaattctgtgtcacctttaaatttaaaaatcattgtgaagaaagtcagaacaccaggtttttcttcacgaactccacagatatcatattcaataccatctacaaccagtttgttagcagtcagagcatttttagctttaacgatttcgttttcgattttaaatttcattttttgtatctccgggttgtttgtttcagttcatttatttgatagttgtatagtaccacagtatgctttggttgtaaaccgttttgtgaaaaaatttttgaaataaaaaaggggagccgaagctccccaaaaattactgttcaaacgcgataactatcgtgataacacgctgaataccaaaagcaagaagacctcctgctacggctggaacaacacctacccccgctagtaaaatgccgccagatactaatgctgcgcttgtaatacctacgaatggactcatttgatttcctctaaatctttggtgtattctgtaactacatcagtagttttccaatattcgttttcttcttttttggctttagcttcttcagcaagtttctttgcttcgtcggaagtcatatgaaaaatgttcattccaactagtttatcaacataagaagaatacatatcaattttagaaagttcttcggtcagttctttgcgagttttaccttgtacaacaatttcacctgaaattactttcttaatgaaatgtgccttggcaaaagctaaacgaaatgctgattcagtttctttgattttgttatcaattcgtttttggacataagttttacgaacttcaacaaagtctttaattaaatcaactacattatcgtaaacttgcagctttcctttctcattaatgacggtaatattctgggaacgacgctcaatcaacccgaagtctttcataatttttgcatggcgttcttcttcattatcgctcaaagagtattcttttcggaatttaactttgaagccaaagccatgctcaccacaagcatcatcccatgtaatgaagcctttatcttcaagcgggtctaagattttactcacataagtttcacgatcatacttatatggaatctcagtgatatgcatttgagttcgtgaagtaaacttatatgttccacgaatttcatattgcccatcaatttcaacgacttcaccacgaaattctgggaattctaccttcggtttagttactttctttccttgaagagcttgcagtacagctttcttgacagaagaaacactatgaggaagaatgtaagttgcataaccagttgcaataccggaaacgccattaagaagaacagtaggaataataggcaaatagaaagcaggcggaatgtgttctttatcttgatgtactggagcatattcagtatctttatatacgttatagaaatttttacttacacgagcaaaaatataacgacttgctgctgccttttggacagtacgagaaccaaagtttccttgaccgtctaacagaggaaagttattattccaagtgttagccatcaaagcacctgcgtcttgcgcagagttttcaccatgatgatatccaaggtccgctacaccgcctgcgatagaagcgagcttatgaaacttatctttatttcctcgcgccaaatcaagagctcgagcaataacaaatcgttgaactggcttaaatccatcaatcatatttggaatagcacgattttcaaccgtgtacatagcataagccaatgcttcattatcaatgatactttttaaatcgcgattattcagttgcataaatttaccatactagtgaatgtagtgccataataacatcagaaatgaaaagcacgacttgaattaatccgaacattactccataatatagtgctaccaataaagtagcaagggctaatgaatagcccaagattttcttaatcattagtagataacaacacaaatgttaaatatgcacacataccctgggctaaagcttgtgaaaacacactgctagcatcgatacagatagttaaaacacatgctactatccaacaaataaatgaaataactcctaataattttgcgatattcataatattctcctcaactatttttagaacctaaaataccaaagtttttaagattgttacgatagaactgcatcacgtgttcgttgtggaaattactcattaatatgcctgcaaaacgaatttaaaattatcagccaacatacggttcatttcttcaagtgtttgatactcagaatgatgattacgagtaaacgctaaagctaactgtccttttccaaatcccgtcgtcagaggtttcatcttagaagcaggcagataaaatactgtgtatggaacattgttatttgcaatagtacgtgcaagctgagaccgacgttgacgaatatgacttagaactgcactgaatccttgcttagaacgctgattacctacataaaatcgtgcagacacgcatggattactaaatggacgaccatctaatttactcactaaaaagtaaaatccaggtttagataaaaagtctttatgcggagttcccaaaaaccattcaccgttcttgattgtaccaataacggtagcgcccgcattattcagatcagtagcagtcatatatttcatattaatttcctctaaattattttctactccaaggccgcatgaatacacgcggccattaaattaatcgtcgcagtcgacgctcaattcccaaaactcttctacgatataagtttcagtatcattttcaatacagaaacgttcattactgttatttgctaaagtagcattaactgtcggtttctcgctagtgctcttaagaggtgaaatacgaattaactgatcaccattatctaaacaaaaaatttcaccaacttttacatctttaaagattttcataattcacctcaaggagtataaaatccaaacgcagttgttgaccatcccatccaatatgggaaatttgcgccaatgtaaaacataagaatataaaaccaaccgctcagcaaattcatcattttacaccattccaaattgtttcaaccacggattttaaaccattttgatgaatatcaattccgactaccgtcatcaaataaattccaactacaactgaacctaaggcaaaaatcagcatgaaaatgaataaagccggaaaaatattatcgaaaaaccattcaataaatgtaaaagcactgcgtttacgcttcatattttcctcacataaatccaaagtaaacgtttaatacatcaatcattaaaacgattgggaatatactcaaaactattagtattataactacattccatatagctttaacaatctttttcattttctgttcctccgtagttgatagggtaatagtaccacggaagaacagtcttgtaaacaacttttttaaaaatattcgtaataaatgtgaataccaactactactgccgaaacttgtgcaacccaccatgcacacgcaataagtacagaattcaaaattttcataataacctcatcacaaaagtaaatgttaaacaaattactggaatactaattaaccaaacaaaacaccaacataatgaactcatagttcaatctcaacgatttccaagtgtttttgttttattgcctttttaacacaatcatggactaaatatgaccatgaatcattatattctccattaactaatcgttggagatcttcacgtgatgataagtaaggttgatctgattcccattttgataaaaatactgcagtaaaaatatctccttcatctgtagttgaagtcgtaaatgcaataaattcaccggtaattttatgtttagcgtaataaaatttaaatttcatttttactcctccgtagctgatagttgtatagtaccacggtccttgtggtatgtaaactgttttgtgaaaatttttttaaatggaaagataccatccattgtagttgctttttcttacaaccttacgaaggtcttctctgtcaccgatgaacttcggagtgtactggataacacctggatgaatttctttagtgttgaatataattatacagtcagcgacttgatgatttagaatgggccctagatttattccagaaccatatggatactctccgctgcatcctgttgtcaccgaaatccaacgtgagtcagtttgatgtgtcttaacttctacacgaagcccgcagtatcttggatgcgccaatacatcccacgcgtatgtatatggatcatcgacatcttcttgacctttattaacatacccgcttagccaatctgctacaaaaaactctgcgtatacagcaatacgacatctttcaataacttctgctttatcctggttcgggttttgttttaaagagtatcttgcagtatcagcaattttgaccttcatttcgctagtcaagtcactgttcgatagggtaaatgtcggaatctgaaatagtctctgtaaacccggattcgttttctgcatttagactttcctttttaccactgagataagcgttatatactttaagagtgccgtaataaattcggtcattttcatctaaagactcgcggtcaagttcatcgagctcctttttatccatgactataacatcattacagtaaagaaacccaagtttttcgtgaccaaactcaaatttattacagtacacaatattagcgtgatgatttccgtgcagtttaatctcttttatgtcggaatcaccgatattcatacaataaatcataatttttccttaaaacaaaagggccgaagccctttattttacttgaattgtgcaattcttttctctagacattcagcataagatttcattgagataaactgcaaaagtaacagttcttgctcaactgcattaactgttagaaactttgcgctttctaaaaatttgctcagtgcattaattttgagcattaattgatcgtattcttcttttactcgtgcttgataacctaacataattttcctcagttaagggccgaagcccttatttaaattgttcagtaacgtcttcaactacttcgtattggcaggtacgcattttagcatcgttgtaatcaatcggaattgatactacatcacgcggatgtactttaacttttacaactcggctagttgaactgccaaagtgacgaatataagatttagaacacacatgcagaccacgagaacaagtttgtgtatcatcgtcattcacacgagtacgtggcattttaactactttacccggactgttatcaaaggtatttgagtgacagtcaaagtaattgctgcgaactactttccaagcatagaagtagccatcttctgtaatttcaatatcgtttgctaccaagaaatcaaagagtcgagataccgctttttggcttgggttttccagcagattttccaagaacggaaaataaaattcaaagttttcgcctttttccatcgagtcaagaatacgatcaaccaaaccagaccgcaattcaatattttgatagaacaagcttccaccttcaattcgaacatcgccggaaatatatttttcaacagcgcgacgaacattaattttttgtgccgcttcttccagcttatccgctacaagcagattaagaatttcctggaagtttgaatgagtattaggagttgcgttataagttacaccgtcaacagtaattgaaatgaattttttagatgcattccaaataatgtcagatttagcaactggagcaataactacatcgctattaactttaactgtaatatcaccgctaatagtaactttagagcgtttagcttcttcagcatttttcaaaacacgacggattgtgtcaaccgatacaccttgccaatcagccaattcctgttgggtgtaattaccacttgaatacagcttaacaatttcagcttgttcgtttttggtcaggcatttaatattgtacataattttcctta

SEQ ID NO: 7 - DNA, 94968 bp, Escherichia coli phage ECML-606-1
  source 1..94968: mol_type = genomic DNA
ctgagtttgaggccgctaacaaaggcaattacatcgtaagcgccgacatgtacgaccggatccgctatatccgcgacgccgtttggtcagagcctgagtgcgctggcttgctggcggggatcatccctgagcaatccgtatatggtttgatggatatcccgacgctggaaggtgacgagctcgttaccgatgaaaatggtgtggtgatgcaggggctggttaagtgccagtttgacggcatcgcgccggacttctcttatgcgctcgacctgaaaagcacggaagatgccagcgaggagggctttgcccgctccatggctaactaccgttatgacgtgcaggatgcctggtatgaaatggtcagcgaatcggcctttaaccgccaccctgaggaattcattttcctgtgttatgagaaagagccgccttacgtgtccggcatttactggtgtacaaagactgaccgtatgctggcatcacaggccgcacgccgcgactttgcgaaaattgagcatcatcgccgccttggggtatggcctcagtacagcgccacacctcgcactatcagcctgcccggctggtatcgtcgttaatttaaaaggaagcccatcatgtatgttactcgcgtaaaaattaccaacgttctcggcattgagcacctcgactttgagccgggcaaaattactgagatctccggccctaacggctccggtaaaacttccgtgctggaaaccattcaggctgtgttgaaaggcggtaacgatgccaccctgctgcgtaagggtgccgccaaaggtgaagccgttctggtactggatgacggcacggagatcacccgcgccattaccgcgaccaccagcacgacgaccgtccgcgacgccgaaggtaaaaagcaggctcgcccttctgacatcctgcgtaacctgaccgacctttacagcgctaacccggttgaattcctcagggcaccgaaaaaagaccgtgtgcgcgtgctgctggagactatgccgctcaaagtggatgccgcagccattgaggagattaccggagagccgtgcagcgcgaccgaaaacgcccatgcggtagacgtgatcaacggtctgcataagggctactacgacgagcgcactggcgttaaccgcgtcattgacgagaagaaaaaaagcatcaagcagctgaaagaggcggtgcctgaggccccggctggcgttgagggcagcgaggacgagatccgcattgccattaagactgccgacgatgcccgcgacgcggaagaaaagcgcatcagcgagaagctgagcaccattaagacgcagatggcagaagaagccgggaagattgataccgcgctggctgaggccattgccaagctccagcaggaagcggaagccaacaaacaggcgctgcgtgacaagctggctggcattcaggttgccgctgagaaacagcgcactaaaaacatcaccacccacagcgagaccacggcaccgctgatcgccgcgctgaatctgattgtggcgaaccgtgacgcgcacgccaaacgtgagcagacgctgaaaaacatcacccagctggaaaccgacctcgaaaaattccaggatgatgcgctgcgtctggataagatcatggctggtctggaggcgtacaaagcgacgctgctggcatccctgccgatccccggtctggaagtccgcgcgggcgagatcttccgtgatgatgtagcttttgaccgtctgaacacggctcagcaggtgagcatcgcggtggagatcgccaagctacgcacgggtgagctcggctgctgctgcgtggatggtcttgagttgctggatcctgctgcgtatgaggcattcaaagcgcaggccgtagaatcgggcctccagatgtttatttctaaggtgacgggcgaagattttactattaatccgcagggcactgtagcataatcatttttgcttaaaggcggggcgcaagccccctaacggagtcatataatgagtaaccaacctgtaaaccatacgccgattgtgcgccagcaggattccggcaatttcaatatgacatctggccccggtctcccggctgaccagatgaatagcagcgtcgtttccattgagcaacagcgtgccatcgcagaagctcagggccagctggtactggcgaagcgcttcccgcgtaacttcgctcaggccatggaggagatcctgacctcctgcgcctacatggagtttgcggaggaagccttttacgcccttcctcgtggcggtcagaccgtgcgcggcccatctatccgtctggctgaggagatcgcccgctgttacggtaacttccagtacgggcaccgtgagctcgcgcgtaatgaaggcgagagcgtggtggaggtgtacgcgtgggatgttgagaagaacaaccgcagcacccgccagatcaccatccctcacatcatggacacgagaagcggtggcaagaagctgaccgggcagaaagagatcaccgattacattgccaacgtggcatccaagcagatgcgttcccgtattctggccctgctgcctaagccgctagttgccgcagccatcaaacgctgtgaaatgacgctggcaggcactggcgagcagaccatccagcagcgtctggagaagatgcaggggatgtttatcaagtacggcgtgaccgtcaagatgctggaaagctatctcaatcacccgctttctgaaaccaccaccgacgagatcaccgatttgatcgcggtgtacaccgctattaaagacggtggcaacgccaaagacttctttaccgtgtccagcgatccggtcgatgatgagagcagcaaaaacgtcaaagacattatcgccaaaaacaacgccgcagctgctagcgctggcgctggcaataagcctaacgtcaatacccagccgaccgggcagcgactggttaagcctgagccacagcctcaggataacgcacaggctggcaatgacgcgcaggcagcagctcaggagactaagactgctaccaaaagcgataagaagaatgcaagcgctggcactggcaagaaaacagctgcaaacgccaaaaccgaagccgcagcagcccagcagcctgaggataaaactggggtagatactgctggcgctaccgttgatggtcagagcgctggtgctaatacgccgctgccggattctcaccctgaggaaccgctgccgccgcaggaagaagacgcgccaaacgttgacctgacgccgccgccgatggatatcccaccaccagaaagcgaagacgattatttctaacaatcgggcctccgggcccttaactggagcattaccatgctgactaaagcacaaatcgtggaacacatcgccaaagagcagaatatcaccaagtcacaggctgagcgcttttacagctgcttcacccagctggtgactgataccctgaaagctggcgaagaagtaaaactgaatggcgtcggcacgctgaaagtggctgcgcgtgcagctcgtaccgtgcgcaatccggctactggtgcccctctggatatcccggaaacccgtaccgtgaagttttctgtaaccaaagacctgaaagacgcgctgaattaatcagcaccctattacaaaaggattccctgataaaaggcccgttacagggccttttctttctggaggtatcaatgctcaggaaagatgttgtacaggtgctggaagggctggcgaaggatttaccgccccctccgacgcctgaggaagtccgcaagatccgcgcccggcacgctgggcacatcagcccggtaacggtctgcgaatgtgggtggagtgacttttttcaccgcatggggtgccggaaccagacggactttcttgataataccgggcatcaaattaaatggctgttcctcgcgcacgatggcccgttagaaggcagcggcagcaggattattgaacacggcgtccatttttgtttcacgggagataacgatgcaattcacccagactcaggggtcagcgatccagcaggtagcgaagtgggcaaacagtaagggcgggcctcaggtcatgcgtctgtttggctacgcgggaactgggaaaacgaccgttgccaaagctatcgctgaggaggtcaaaggcaccgtactgtttggcgcgttcacggggaaagcctcgctggtcatgcgtaagaagggctgcaccaatgccagcacgctgcacagcctgatctatatgcaggatgaagacgcgcctccgggcccgcatcctaagtttattcttaaccctgaaagctcccttcgttacagtcgcctgctgattgtcgatgaatgctcaatggtcggccctgatctcggcgctgacctcctcagctttcatcgtaaaattctggtgctgggcgatccggcgcagctccagccagtcaacggagagggctttttctgcgctcccggcgtccagcctgacatcatgctcacagaggttcatcgttcggcggctgaatcgcctatcatccggttgtctatggacttgcgcgaggggcgtcgcctccagtacggcacctatggtgacagctgcatcattgagcgcaagcacctcggacagcgccgcgtgctggaatctgacatcgtgctttgcggcatgaataaaacccgcatcaacctcaatgagaagatcaggaagctgaaaggggttgagagcccattcccggtggctggcgataagctgatttgcctcaaaaacgacaaagagctccagatgtacaacggctcgatctggacagcgaagcacgccgcagagccagaccggaacgggctggtaatgctcacagttgagaccgaagacgatccgaccgttgattacccggttgaggtcatggtaccggagaaattctttctgggccgcgagaaagagctccactggactgagttgcagggcatccagcagatgtactacggcaacgcgatcacctgccataaagcgcagggctcagagtgggagcatgttgtgatattcgacgagggcgggatctttaaacaggatgcgtggcgctggcggtatacggcgattacacgcgccagcgagcggtttacctatattatgtgattacatgccttggctggctatccagtcagccttattcttgtcccgcgtggcacaatcgccgtacatgcctaacaggtcagaatatgccttatacagcgtccccatgttttctccggggtcgaggtctacggcagggcaggtaacgcgcagcgattcgctcatgtgtggcttggcctgatcaacgacaacctgcgtcgccgggcgaggcttatcgctacaaccagcgataaaagtcagggcggccaccagcatcagttttttcattttgatgcctccgcaggaactacgccgatgaattgcgcgttgatatcccgtgtcttattgagcaggatctcacgaccggacgcggggagtttacagtcggtatagactgtcttttcggtctctttctgaatggtgttgttgtaggtcttgttgacgatctggatgttgttcagcgcggtgaggaagtttttctccacgatctgagcacgatgctcagcatcaatgcgccgggcctccttctcctgtaaggctacgttctgagcatcaatcagggcctgacgttcccccgccatgcgtagcgcttcggactccgtacccgatttaaacccaaaataaaggccggaaccgccagcgcccatcattgcgataaggcaagcaacaattatccatgggacagcttttgttctaacgactgcggcacccgcaatctctaccgtttctttcagtggattactcattggattatccttaggtttacaggtggcaaaataaccaccgtgtcaccgttgataataccgtcacggaaacttacagtgcttctgattctgtagtctcccacaggaagatcaggcataacgaatgcgtaagatctcaggtggcacccaccatctgtaagaatctccaatggaggcagaggaaaaaccgtgccatcaggtgccaccaaagccggagaagaattgagttttaacttcccctttacgcaatacagccgctcaattctgacctcatcaccagccatgaaattcatggagttttcgccgtgagcatccagcagctcagtgcgctttaccgtgaatgtcgctgtgtcggtaaagatgtaaaaccatcccccggcaaggaaagcagccaggacgaataggtatgtaagggcacctactagcgccctcctgtgcttgtaatttctggtcgtcatttaatgatcacttttgccagtacagccatcatgacggatgacaggacagcggttgctaacccgtaggcgatcagttttacaggcgtaaattcttcacgggttatcttttctttgaccagattttccagtgtcgagaccttctcctgtaaccgaaccacgttcagatttagctcagtaatttttttgatgtcttcggagtctagtgccatcgctcatcactcaaagtatggaatatatttagcacggcgaacatgaataatgttcgatacgtactctcggtttattctgaaaaacgactgaccatagccctgctttggggttttggatttcaggctgtaccgctcgacgtggttccaccagcgggacgaatcgcagccccgcgtgttggcgcacagacggcgatcctgtagcactccaccctctccaccgttgtaagcactcaacgtgaaggccagccgctcatcagcgttagccgctcctttctggcggctgaaaatggctttatccatttccacgatggctttgagttgatagtcggcgtcatatcggttctcccagctccagcccatcaggcttttgtgggccgcagccagctcgctgatcttgtcgaacctgatagagccatctttattgtatgcgcgggtgaactgccccagaccgatcccgttctcccggcttgttttgagctcagcacgcggatcccagcatcgtgaatgtttcagggtgatgcagctttcctgctcaatctgccccgccagaaacgatggcatcggggcgtcgggccagatggtgcgctgggcctgcaccagatccggcagatacttttcagccttgggcggcacactggcgcgggcatcctccagtgaaaccacaagggcaatcaccagcgcgaaccagacagccgttaacgcccagagccgtctcatgccttggcccacgtaacgagggacaggataagcagcccgacgaatagcagcagcccggcgacgaccgtcccggatgccctgttacccccgtgcgcctcattcagcagccgggtaagctcgatctgcgggaacatcatgcgggagacaatgacagccagcccggtaatgattggcgcgaccagcagccactgcacgactgtaatggtcatggccttatcaataaaccagaggatgataaaacaggggaggatcatcagtagtgcggtcttatcgaccagcgcccgcaggcgtttgacgatggattgtaaaacagtcataaaaaagccctcatacgttggtatgagggcagtttgtcatcacgaccaggactggtcttattttttgccttcgagcgcctcgagacggcgggacagcacctgaatcgcagccaatgcgtccagcagcagggcgttactatccagctctttcatttcgaacggggcaccattggcgttggggtaatggcgagttttcacatacaacggatcgacagtttccgcttgctgtgcaatgacgccacgacgcaaccgatgctgctcatcattgttataaatgaagctcttgaataccagatcttcaattttcgccaatgattcttcgggtgcataatcattaatatcgtgctttgcccgttcatccgacgtcgcatttttcgtgaaggtatacgtttcagtgccatcattacgcatgtactgaatatcgaaggattcagaaacgaacagcgcggatcgtgaagggactgaagaagcccccgtatttagattccaatcccaggtattcgcaatgactgcaaccgggtgtgtggcgtccccgtttttggggcaaagggcaccaaaagaaataaatccacgatagccacccccagcggtacctccgccaccgccgacaatcggggcataggctgaataccctgcggcattccaaaaattaccggcattgaaggcaaccgatgacggggaggcgtcagtcccggtgccagctggtcggttattgattctcagcatcccgccgctaaacgacatgccattcccacggacgtaatttccctgcgcatcatacagcgcagtattgaaattcatttgtggattctcgtcgccccagcgataagtggtaataacgctcgtagccgcacgcgtaacgccagctacggtgtagttagactctaccgtaccaccatgagcgataaatccagtttgcggctctgccgcatcggcattgatgaccgaaaaggacgtccccgcagcgataaaagaaccggaggcgcggataatccagatgcccaacgccgcgttgggacgaatttcgtttgttgcaaatctcccatatgcagcgttactttttgatgcgtcgagtgtcagcgtgttagacgcagcggttgcagaagatggggtaatagcaccatagggggctgccgcaccagaaaagagcgctgtacccacgccgttgccggggttgaaagcacccgcgcccgctgtcgataccccgccagtgatgttgggggcggcgttttcaataatgttaccaacaccattcccgaacaagcgccctgaactccgcaaaaacagaccttgtggcgtccagcgctgagcggggtcattccactgactgtttaaatctgggatgcggaaagtggtcgagccatcacccggagaatacattcctcggttgttccactccgctccgggaacaccgctgttttgccaagccgcatcacttgcagcggagacaaggatcccagcgtttaccgccgcccacagatccgccgtacttgggtcggtacgactggccagctgaccatcggcagcaatatagcctgccgggagtttcgcacgcgagccattaaaccattcgaccgcaccgatgaagttattcatcacgccattcatggatgccccgccagcgccgccagaagccgcacgtagctgtttcagggttacggcgtcataatcaccagcggcatcgccgcctaagcgcagaggcccgctgagcgcgtttaatgaggtaatgtcattgttcgcaccagatgcagccagcccggtgatcgccccggtcttcccgttgacgctggtcacgttggtgctggtcagctcacgccagttgctcagtacgctcggcggcatctgggtgaggatgaaggttttacccagatcctcacggatagcgatatcgccgcgctcacattgcaggcccagcattgaagcctcgttaggcaccgggaaggtatcgatcacagcgatagacggcatcagtgagccgtcaattttcccatccgggccagtttgcactaccgtagacggcaggttagctttattcagcttgccgtttgcgtccagcttggcgatgacatcggacagcatatcatcggcaatcttcccggttgtctggtcgcgcgtaacgaccagcacatccagcaggtttaacgtgtcgcgcaggcgctccacgtcatcttgaaggaagttgtcagtgtacggcagtaaaagccccagacggggcgttttctggtctactaaagccattttttatccttataccagagatacgcggcagttaggtacgtagacgcgcttgttagcgccacctttgaggatcaccttcaaacgcaccgcagcaccagcgatcagcttgccgttggtcgttacaccagccgtggtgtcgccagccttgatcgtaaacttgcggtctgtcatgttggcctgattccccggtgttgatccggtttgctccagcttcgtccagaccatagagctcgacgggttcttgtcgatagccagatagacctcaatggtagcgttgttcgcatctgccgcagtcaggtacaccgtcgctgtcattgggttctgagggtcgccagcaaaagcacggctgacgtatgagccctcggtggcaatggagccagcgataagctgcgatcccggatccagcagtgcagacgcatagccgtcaggtgtcgagcgcacgaccgcagacactttgatgtctccggtgatcgcagacgcgttctggataacctgaccatcagaaacggtttgcgtggttccgttcgggaactccagcagaaagttagcgtcggccccggttgcaggaacggtcgaaagcatagacacaagaaaatcggtcgcgttattcacggtcacagtgccaagagccatggttttcgatgcctgtgtatatttgcggcacagcaggcggaacgtcagatcgcggtcttggtgcgccgtccacgttgaggcgttcgcagagctcagcagcacgccgacctgatacggctggctggaaacgtagccaccacccgcgaggttaggcttgccaagctcagagatacccacagccatatccgcatcgttacagagcactaccaccgcatattcggtattcggcaggctgtagaacggctcagcgaataccacgcggttataagcgccctcaacgatgttagccggatccagtcggccctccgccagaatggtcgtggtcgggaagcctacctgagtgtcgcgcagctggacgatcagcggggtgctgcccttcttcgtcacccagatctcaaccgcagccagatggcgtgcagagtcagcgataaaggtctgcgccagcggatcgtaatacgcctgcgaaacgttggtgactttgcgcatgttgttggtaacgacagtaccctgcccggtaaacatcgcgtcgccgttgccgccctgagtgcctttaaattgcaccagttttgtccccgcccttaccttgggcgggattttgaacttgccgcgcactacgccattggcatcggcttttaatgaagttggcatttaaaactccttattacggcgtcgggttgacagagatactgtcaaagaatacggaatccagcggctcattcggcgcaaagccagtcaggacaaaggccacgtcgatttctcgcaggtactcatcatcgcgggtagtcgtgctcaccagctcagtggtgtccatcgtacccgtgacctgagtcgcgccgtggatgcccagctggaatgaccacggcgcgtacactaccgttgtgaaataacgcgtttcagcggatagccagttggtctcggtgcgcacccagcggtcgattgacgggttgagcgtgacctgagccgggaacggcgcaaacgccatgtacgggttaactttcatttccccggtacgcgcggtgttactcagcacggtctcgtacacaaagtcacacgacagctgagaggtgatatccgcgcttggcgttgacacgtcagtgactgccgggccagcgataggcagctgtaatgcgcctgacgcgatggcggctgtctgtgtgaacgatggatcgcggttatcttccccggtcatcggatcgacaaatacgcctttcttcgcagcactctcacgggtgttaacgtccgtcagcaggttcagctgggcaatgaggtcagtcatggtgtccatgcgctgattcatgccttccagatccgacattgagaccatgcgcacagcgtcgctgatcacatagtcctgattatgtcctgatccctgagggccggaataccaggtatgatagacctgagccagtgcgaggacgttgctcggtacctgcggataaattgggttgaagtcagacgcaacgccgttaatccagctaaattttccggtctcgtcgataaccagacggtcaatacgtggcagcttactttcgtaagaaaccagaatatcggtacctgccaccgcgccagtgatctggaatgcggtatcggtgaagctgtccgctacagccagaccatcggtgtaggtgtagatggcgtgatatttctggcccacggctggctctttagagcccgaaccactcagcgaccagtcaatctggtcagtgatgtcctgcccggtgctggttttcgcgtactgccagtcagtacccttgatgtagaccacttccgcaggcgtaccgcccggccctgctggtacatagaccttgctgatcgctttcgcggtcggctgtccaaggttgtcgataccaccagcctgctgtccgcgcgtcagctcctcatcggtctggcgggtgatcaccactttggtgatgcggttgataggcggacggaacacgtcaacagattcggtgccaccgcccttggcgttgtgcgcctcagagtcgatgactttcagatccggcgtgaatgcctgcaacagacggcgtgcagctggcagcgcaatagcgaagccattaacacgggcgcggcctgcgtcgatgttgaatacgtacttttgcgagcccggatcatcatccatgcgggaaacgcgcataccgctcaccacatagttggagccgttcgagtccacgtcatacttggcgatggcctgcgtaacggcgtcgaggttcggcggcggctctttcgcacgcagctgaccgtcatccacgtagtagatcgggaagaattcggccccggtcgtgccatcaccctgccagccccacgttgggataatttgcagacgctcagcgcccggctcgttataaccacgcgtacctgctgccgggtcaagcagtgacgggtcatcagcggaggtaatgatcttctgaatcatccagacgccgataaccactgttccggtcttcgagattgagaagctgcccggccctacaccgcgcatcgcgccagccagataaatcgcgcctgactccagcgtaactttcgccatggtggagttattcgggtcatcatccagaatgcagcgtgcatcgcgggaaatgtcgccgtccttaaacaaggagtcagcgatgcttttcagtcgggcctgagaagcagatacgatttcgtttgcctcagcggactggaagatgcgcccggcgacaaacatcggtcggtcgtagttcttcccgtcttgcgagccatctaaaatgcggtcatagaatccgtcgagtggaatcgtgccgccagtcacaggggtagacattcaggcgctccttagaactggataacgaattcaaactgctgacggatagtttcggcgcgagtcagtttgtcgatgtactcaagcaccagcagctgtcccggcgaggaatactcagccacagcgttaggcgaggcagcagccatcagataatccgggaaattcgggttataggcattctgcccggcaggctgagcacccagcggtacagtgttgataaacacgcccagctcacgaattactgggttagtgctcggcgcgttcggatccacggctgcgtctttgaagtcaaacgcaaagcgcaggtacaggaatttagtcgggttcgtggtgaattcaaaacggtttcccggcaccacgatggagccatttggatccagtaccacataagatttttgagttaccacgcggcgaccgatttccttcaccagcccggtggcagatgcaggttcagtcggtcgggaggcatcccatgacggatcgccagagccccacgcacagtgaatggtttggttcatgattgcggtggccactgcggcgcgaccagcttccactaaaattgccataagtccctcctgaggattggctctagattaaagtcacgacgctgttaaggtgtcgggttagttgggtcagtcgggtcgctgccgtataaccagtcattactggtgtcccagttgtccgggtcttcccatgtagcgccgctgattttcgtggcgtaaaccttcgccccggtgagcatcccactggcattgaggaagaatttattttcctctttgtagtggttggaaaataccatccactcatatggcttgctccatgtctggaagccgcgccatgtgcctgcatcgcgccatgttttcagcgcttccgggtaggcttgggcaaacttaacgtccgaagcacccagcccacccatccacgcggctactacatgggcgtccgccgtgtagctgagcagatggctgtctttgccccatatgcggcccagcaggcgctcttttggcgtcagcatggattgcatggaggtgatcgcggctttgtagtgcatagccagctcgaccggagtatcaaagcgcatatcatcgagtcggtaatactcgttgaaggcgatgaaggcgatgcgcatatcccagatactcgtccagatctcgcctgccagcggatcgttgacgtaataacgcatacgcggctcaggtgtcatgatgtcaacgcctgcggccttgttgcgctgaataatcgggataatcttctcagtccagtccagaggcggtattgtctggtagctgacgggcttaatcaggaagtacccgattgagtccttgtcatagaagcggctggcgctgtcaaagcgaccatagtcgaggcggaaaatgtcattccacggctcctcaatggtcacatcgtacccggtcagctccttgatcgtgttctcaatggcgatggcgttcacgcggatgcgaaacgcctctttggggatcagggcctgatagccattgtcgctcatcccatccgggcgagtgatgccgaacagcttcccccagtaggccagccagctgccttctgcctgtgtgatgatcatctgcctgagggcttgggtcacggcggcgcgggcatcccggatcattgtggcataggcacccatgatcacatgcagctcatcggcaaaacccataacccatgacggcgtagccttctgcaccagcgtgctcccctctagcataatgcaggcgctgagcgctttactgtcagtctggaggttgaagatatcgaatccatccaaggccagctgtgctgccagctgctccaccgtcagcgcggtaaggtcatacgtgtaatcgtatgtgccaccggggagcaggttgataatcagtttttcttcggcaacgttcaggcgcaggtctgaggttttgcgtgaaatagcaaacagccggacttcctcggcggaggtattgaatacggcgcggtgcaggttactcaggaggcgctttagcgttgttttcatggcagcacgatccctaaggtggagatagtcacctgatcatcggaggaggtcagcacctcattctgtccacaggtgatgttggcgctcatggaaaccgtgactttttcaatgccagccacctgcaatgccgccgatttcacatcgtccggtcgcagaatttccccggcttgtacagatcccagcaggctgtaataggcattgcggatagattgcttgatcgctggcgtcagggtgtagccagactgcatcccaacgaggaaggtcatcggtacgactcgcgccgacatcgcgccgacatcggtacgcacgccagcagctgagtaaccggggatcctctctccggtcgtgggatcctgatacccggtaataatttcctgagcgcgggccaacagtgccgggctcggagcgccaaggttagaccagatgtaaagatggttatagccaagcgtgtagtcatagccgcgtcgggtgacgaattccaccatcacgccattggagtccctgatcaccgccgtagtcagcgcgtacatcagggattcgtaggtgccacgggaaagggatgcaatgtacgacgcaaagcgcaccatgcgatccgcttcggtctccgcatcgctgcccccggtgatctccgtgttggagatcgtgaagtctgccggggcgaagaaaggcgaggcgttaatctcacctacggcagcattacccttaaagcccggtgataatgcctgcacaggcacacggatagtcgcctcggtaatgggccatgtcatttcaccgctcgacgcgtactggcgtccatccttcgccgtgaacacggtgccctttgggatggtaataggctgagttagcggcttattcgtggttacagtgacgaggccggacgcataagtagcgcccagcaggacgaaattaaacgagcgataagtggcgaccgggatcgcctccagtagcccgttaaacatttggatgtagagctcctcgacctcttgggcgggagcctcaatcagcgttcgggaaacagagcccggctggaggtcagtaattttaacggtcgtgccgcgcacatagttgagcgccccggcgacgatactgacaaagtttttgatctgaaacatgcgcaggcccaccatcagcagaatgccgatagtgtgccatcacgaccagcctcagacgtccaccttgaggtcgatagctgcgccagcgataggcgtcaggtcggcgctgatactcatcgcatcgccgttctggctggcgaccacgctgttaaccgaagccacgcggtaatcagctttcagtgacgctttgacgtagccagcgcccagagtggttttcgtcgggccagtgaccacaccatgcaggaggttcaccttgcagccatattccgggtggcgatgaagctgcccggtcggcgtgcggatccggtgattcagctgctgagtcaggttgtcgagccctgcgcatactgcgagatccccatccacggctttcaggcgacggttgaccatcagacaatcgcgttcgaacagctgatcgtaatcggtcttgtcggtgtacacgcctgcgggggccgggacgcggatcagggatccattcagcagcacgccatccttcacggcggtagggtcatccgtcagatacggataggtcagcgaattgagccagagcagctcagcccagcgatttgcgtcgttgagctcgcgtcgggacaccgcttgcaggtcatcgccgtattgggtctgtaccagccgataagacggcatctggcgttcgaattcattagccattgtaagagatcccgttattaatcgtggtcaggtggcgattgagctcagccacatcctttggagccattaccggatcgttgttacccagctcggacacggaagccgctgccgcactggacagctgtaccggagatttctggtcatccatcatggcaaaggcgttactgtccacatagaggctgcgtgcgctgccgccagtcgttgatgagcagtttgacgccccgtacaggccatcgtagttgtcataagttttacgcggcttgagggagtttttaaagatacataccacttcctgaaacgagccggaaacacgcataaacgcctgtttaacatcatcagggatatccgcgatgttggacagcgtgcggttgaggtttaccccgacgcgggccatatcgtgcgcgatgccgatcaggtcattcgcggtaccgttgatggcgttctgtccggtagcgataacgctgtttaccgtgttgaaaatgcggtttgcgctttcggtaaaggcccggacggttgaggcaaacggcgcgatagcggcatttttcagatccaccgcctgcttaatccatccctcaatatcctttccgtagccctcaatggtgcttaccacgtcattaagcgctttcaggccggagaagatagagccggagaaaggcaggatcatcagcggattatcaatgtctgtatcgacacactggagattcatcgaatactggaacagcagcggacgggagcgggatcggcgcagcacaaagttggacggcgagaccacccatgtaaagttgttcagcatatccacgtacaggagtttcacctgacggggatcctgcccgttgtcgatggcctgctgtttggcctgagggtactggtgcgcgatcagctgattgagggtttcaaacgcctgagcaccatcctcgccggagccctgcgcggttctccagccagtatgcccactgatactcagtttcgggaggccctcgccaaactgatcctcccagccctgcacgccacgacccagcgtctgcgtaacgttggagcgcagtggttcctcgcgcgtgaagtcttccgggcgcagcttgagcgttaccggggaattgagcccggacggcgtttgcagcacgaaagcaattggctttacgcctgctcgctggtcggttggcctgctgcttagaaacatggattatccccttactctggtgttttggtcttgctgccgccagactggacgccaccatgaatgtgcccgatttggctgatattgcccgcgatctggtcgccgtcagatttcaccatgccgttggtagtaatatcgccatcgacgtgcagtttttgcgttgcatgaaccatcggcgtgtccagcagaataccgtcactcgctttgatagtcgcctgcgtacattccgcatagatttcgtcctgggcaatcaggcgcactttaccctcaggggtaaaggtcatctccaccacgttcccagccatgccgatgcggaaataaggctttgttccggtgttccggtcaacagccagatttttgtcaaagtttgccccggcaaagtcgcggcgatccggtttggtacccatggtgatgtaagcgccggacgggtgcagcagcccagtgttaccttctgcgtcggtgtaccggatcacgtcagagtcagagcgctcaaactccagcccgtcctcatcaaaggtcatctggctgatctgcgggtacaggaagcccgtgacgaccggggatctcccgataaagtccaccgtcgccatgacctcctgcccagtctgctggctgatattccacttatccgccccacggtcacgcacgcgggggatcttattgctcccagtacgcgctgagcctgaggcagtcagcacctgcaccccggcaaagcgggcatagttgtctaccatgatgaggtcacaggcgtggtctttgggatagctagccaccacaatggctttacgtagggccatcagaaaatatcctttttgagagaaaaaagggcatccagatccttcccggcgctggtcaggtcattgccacgggtagcctgttctttcagccatgggcttacgcctcccccggtgctgctgacgcgttcggcaaatccggtaccgcgtgcaaactccagcgcggtgctgtatgagttgtacgggatgaaattatcctgcacgctaatgatataggcgctccatgagatttgcccatccagcacggtgaggtaatcaccgctgcggagcgcatcggtcgagttatcccgcgtcgggccacccttcattgacagtgcgccaaactccagcaccacgttatctttattggattggatcatgatgtcacggcgatccttaatccagtccagcatgtagccgctgcgctgctcttgagggttctgctccagtccgctggaaacgctggtcacatcgtcagggctcatcacggaatccgcgtacatggcacgcacgccatagtatttcttcgccgtgttcgggtattccatggtctgctgggtaccgccagccataatggcctcaaccttgcgataaatgtcatcgaccatcgcaaagcggttattcgtcacccagtaatagttataaacgctcgaatcgttgcgcgtctggcggatatcggagatatagccatctggtaccgttccgtttttcggcggctgcggcaggttctgaatggctcgcccggtcatcaggtcaattgctggtaccggacgccagacgaggtatacgccatcctcgcggtcttcaataaaaagctcattccatacgcccacatccagatactgcttcatgaggtcgtatactgagccctcctgattcatccagctgtcagacactgagcctgaggcttgcagatcaggcttgatgacgcgcggcacgccgttatttttcggcagcagggtatcaagcagcgggttaatggctttgtccagcagcaggttgatgaattcagccccggtgatgacgttcttcacgttgccaccaaactgctcgaagaaattccacccggtcagcagcggtgccgatccgtcatagcttgggatgtagagcagctggaatgactggaggatcttgccgtaatcctgcccgctcaccaccaccgtgcgcatcggcttgccatccttgcccatctggcgaccacggctgatctcgctgacgaatccgcgcatcttaatcggcaggggattcgggcatgggccgattccgttccacatgcggatctctaccacgtccattggctctacgagcccataaatggactccagcccggcgcggtcgagtacctggcccatgttctgcccggacacgttcggcttgtctgagaagctcagggagaaggtaccgcagggttgcccgatgttcttcgtggtgctgatacttgtcccatcgccaaaaaacggcgtcaggtcaatgtatgcctctttgttggcgtagcgctcagaagtaggaaggccagcctctcttggctggcgcattatggtcttgtacaggcgcacgctgatcttcggcgtggcaacgataacttttggcattcttacctcgttgcgaagctgcgcggttggataaagctggagctcactggcagctgttcggttttaataacctgccccgacgaatctttatgctgtacctccagcggagccgccttaatatcaatccgtccaccagtctgaggcatcgttttcgggtcgatgttgttcaggtctttcagcttatcttcccacgcatagacgcccggcgcatagttccggttttcagatgtgtaacgcccggccccggtaccgccgttgtaacggctcagggcttcatattcgttaccaccagcagcatccagatcgtcgcggaggtgcgcagcaccagccatgatattcccgcgttgggtgtagatatcgtactggcgcatatatttggcgttccacttcggtaccagctgagcagcaccgatagcgccagcgcggctgaccgctttgttactgaaacgggattcctgcgcgatcagtccacgtaacaggcttgggcggatgttgtacttcttcgccgcgtcctgaatgtccttttccatgcttttcgcgcgcgcagccatatcgcccggcacgttctccggcagactggctttcgcgttttcgatcagcgcagccggagaatcgcccagcgttgaggtgtccatggccccggtttccgctgacgagctatacccacctgcgagctcatcaacacggcgattcatcgcagcagtttcaatatcgcgctgacggttgtttgcggcctgcttatcaatgattgctttacgcttggcgttcgcctcagcgtcattccctgtcaccatgttcagcttggcttgcaattcgcggttggcattgtcgaaacgcatatcaatgcgacgtttgccctgcgatttctcgcggtcgatatagttctgcctcaggctggcttcatcgcccacaccagccatcttgaccagtgccatgcgcattatatccagcgacggcagagcgcgatctgcaaagcgggtcatggtgttgtccagcttcgctacgttatcgcggatctgggatccttctgttttggtgccaccgtgaacgctgaccagctcagccattacatctttcagcttctcggtatcgctgcccttataggcacccatcaggcgctgacgctcggcatcggtcaggtcttttcggcccagataatccttcgccatgctgcccagaccagtaccacccccctcaatgatccccatctgagccatcagctgcggggtcacgttcaggcccagacgcttggcgcgagagtccgccccggttaactgcgtcatagaggtattggagagggtcatggcctcattaagcccggtgcccatatggttagccagcgccatgtaatactcaggtgtaccctgcccatactggcgagccatctggcgtttaaccagatcaaacatggttgtgctgccctgcgggccagcgccaaacgcgcgaccgtatggcgtgttagcgccaaaggcggagctcagcgtgccaaacatcccagtttcctgaaacgctcgcgtctggtacgggttcaggcccgctgccatacccattctggcggtgaaggcttgggacgcttcacccatgttgccgccgcgtgacagggacgcgttgacgcggctcaggagcgatgcagcgccctgcacatccattcccggcaggccagtttgcatcaggccagccagagcgccgccatagccagcgacgtttggcccggtcaggctttgccgtgctgccgtggtggcgaagttggtgatcgcctccatggcttcattggcctgcccgaaagcgccggatttaccgatggcctcaccgataagcgcacccatgcggcgagtgtcctgatcggagcgcccgatattagcaccgcgtagccgcgccatgcttccagctacgctattcggatccagaccaaaggtacgcgccatgcccccggcagtgagcagcccggtcatcgggttctcacccggtcgcaggttcgcgcgggaatagcttgacgccattgcaatagcgtcggaggtcttcatgcccagcgtatcagccagaccgcctgcgccaccaatggagtttttcagcacagcatacgaggcaacgcccccgacctgacgatacagtttatcgaggccaatggcgttatcctgcgcctgcgcgaccttatccgcgatagcaccgatgatcttacccacgcccagcgcagccagaccgcccacaagccccatcaggccagctccagcaccagccgataacccggtgctcagagcactggaaaatacaccaccgaccgggcccgttgctcgcagcccggactgcatgatattaagcccatgagcgccccagccttgacgccagttgaatccaccaccgcttccaccacttcccggaggcagcgctggaggcggcgtcggaggtgttgggcgcggtggcttcggctttgggttatcgtcaaaatccacgccaagaaattgcagcatagactgcattttcttgatgcgttcagcctgatcgccatacatctttttccagtcagccatgagcgggttagtcgatccttggcccgttttacccatagttgttctgagctcagtctgtactttaagcagcttctgcatctgcttgatgaaggcgtccaaatcctctttcgatttgacgttaatcggctcaaacttctggttgttggcctgaccgacctgcgacgcgaggatgcggatctggtcattaaccatctggatctgctgtttcaggtctgccgcatcgaactgggcactaaccggaattttaattgccatctacgtcttcccagtcgttaacttcggttatgtcggtttcgctacctgctggcgtttgctccccggattctgcttcctctgcccactgctgcatgatcgcagtagcatcaaaggattcatcctcgacgacatccatcatcttcggattatcctgatacgtgtgggcccagtattcagtcagccgttcctcaaacgttgtctccatgtacagggggctgttcgggggcaggcggaatgtccggcgataccacagatccaccgtgttcaccattttccgcgctgttttcttcgcccggtgttctaggttttctgcgaaatgtttcctcacgctctctcagagcggcaaacacacgccccagcttctgatacgtttcgtcatccagaggatccatgttttccatgtcccagccttctggagcgtcaactaccagcacgcgcaaggttgaaaggtattcagcgagagtgatcagccatgcggtcggttccacgccgccagccattgacgcgtattcgcgctggatctccacctcaatagccatggttcgacgcgccgcacggaagcgaccgatatccggcacgtcaaagtaatagtcatttgcttttggttgtcttgccacgttggaatcctcggaaagggagaaagaagccgccccgaagggcggcaggtatcacttacgcgccgtcaccgctcacgtccagcgcgttaaactgggcgttggaggtaacgatggcgtgtttctgggtctcgatggaaccagatgcgtagctcacgccagtgtacttacgcagcagagcgccagtcaggccatcatactgctcaatgtcgaataccagaccttgcagcacggcgtcgccgttctccggcacaatgcccgcagcttgcagctgggacttgttcaggagcatggcgctcacgctcagctggtgacgcgccatagtcggcacccactcctgtacgtgaatgtcaccgataccggaagcaggttccggcgcgtagtcatcgttcatagaaatgttctggatcaggccgatctgcttgccatcaaagatgaccttgatctggttgcctgaccgtacattgcggttctgcttcatcgcttactccttagacggtcgcggtgccgctgtacggacgagcgtacatggtcacgaggatgtagttgttagggacgaccggggatgcctcgtactgaatacgcattacatcgccctcaacagtcccggtaatgttgcggaatgccgggctgttttcgtcacccgccagcactgccgggcccattggttctggcttagccagctcagtcagctgacctttaacagtgctcagtgcctgagacagcaggatcggggactgcttggagccgcgcagctgatccaccgcctgacgcacgttacgctgtgtgaagtcgatagccacgccgcaggactgctcgcgtttgttgaatttgctatcaaccagccaggtcgaaatggactgcgtgattttgtagccagtatcggtgttctcgataggcatcacgccgccaaggatcagctcgtcggtctcggtcgggttgtccagatcgcgctccagcccgttcacgctgatcaccttgttggtgagcggagtgcccggattcacgccaccaaacgcggcggccaccagtgctgcggtcatgtacgccgggcgcagcgtcagcacgccagtgtcgtcatacgcgtagtgcccgatgtgaaccagagaaacgcggtcgctgttcagtaccttggcgcggcgaattgcttcgtcgttggaggtgctgatcggcgtgccgacgatagcgcggcgctctttgtagcggtttgagttgaactcaacatgcgccttaacgaaaccatgtacggcttcatcaccggagcacgctgccacccactgcacgttgcgctctttcgccagcagatccagagcattgctccagtcagcaggcagcggagccacgacaggctgagaggtcaggtatttgtaatcctgaatctgcgggccatgccagatggcaatcgcgttagcagcgttcagctcgaagtccagccagttgcctacggcatccttaaaccatttctggaagctgtagccgttccagtagaagtcggcgtccagcgttggcgtagcggtatcagttttatatgccttctgatccagcacgctcggagacagagaacgataaccagtgctcaggaacgtcatttcgaacggtttcgcgccggatgcgttagcggtcacgctgttcacgtaatcagcgatgtcgcccagcgttttatactgggttaaatccagctcaatcttctggaatacgccatcgccgccctgctcgtcagtgacgatctcaaagacgcccggagccaccagaatatggcagtccttctctttgattttgaggtgtacgcccggcgcgttgatgtcgttgccagtcacagaccatgcagatgcgccagtgccgccagcaacggtcacggtgtacaggccagcttttgagccctgctcaatcttggctttgatgcccagatcggttttgctgtacgccttgcctttcaacgtgccgaaagcgccagtggcattcgtcgtccctgcgataattggcaggtcgagggtggcctgaaacgctttgtttacgcgtatagcgatgacagtctgaggagagccagtctgagaggacggggagaaggctttcaccaccgcatcgcagagctcgccaccgaccagcgcctgtttagccgcgttgggggtgctgaatttcagcagtttgaatgactcaccaccatcagcctgaccgatgtaggcaacaacgttcgttaccgacaggttctggttcagcatggcgtcatcgttcactgcggatgcagtggtaggcgtcgtcagcagttgaccattaaaaaatacgctcatgtgatccccttagatcagcggagtttcgaggaattccgcataacgtttttcgtaagcggatggaatatcgcgcacgcgcccggcagatgtctctttcgtccagaagccagtgatcagcacatagcgcttttcggtcaaagacagacgcgtgcaaaactcgtcaagcgatagtgggatctcagtgcttactgccgctgcatccacttccgctgcgattgcttttgatggttgtttagccattaggattaacctcagtaatgacatccacgatagtggcatcagatttaagccctacgcggatcggcgcagtgcagttgaaattcccggtaacaaggtacataggggaatcatattcgccgctcaccgcatcttcggtgctcagcgataacttaggcagcgtgatcccggcgtctgccagcacggtcagattggcgatgatcacacggcggatggcctttctcagctccagacgctcatccgggttgagagaccagccagtaatggaaatattgacatctgcgagccagccagcctgctcagtaaacatgtcgtcggcttcatccatgtactcaacgttgatggtgtcgccaataaagcgctcgcttggctcctcgctttccagcgacagcgtgacgcatggcagcatcaggttgttttccatctgcggtggcgcggtgaaaacttggatatagcccagctcattcatcagcgttttgcgctcgacctctaccatcagcccggcttccagacggtcgcgcagcagctggagcgtatcggtagacgcatcctgataggtcgccatcggcgtcccgtagttctcgttgctgggctcccagacgccattgacgtagtaaaacgccttgtagaaatacttgacgttgttctggaggaagtggtgatcgacaaacgcgatgttgtccccctcgtaaacgataagggcgtccgggtcgctcatgtcgtccttaatccctgagcgggggaggcgcagcacttgccaagccgtcgcgccagcgggaggctggaggaatacttgcagtgcgttgccgcaggactgtggcagaatcagcgtaatcatggctatattgtgccgtcacgacgccgggcgtgatgctaacctttgaatcggaggcgcttatggctaaagactattcaatccagatcaacctcggcagtaccatggatatcctcggaactatcaacaaagaggtgttcccctacctgcatcaggccgtcaacgcggtcgggaataaagtggcgcaaaagtggaaaaaggaggtactggagtcggatttatggagcggggaaaaggataagtacgccaagtcaatcagctggcaaatgaccggggatttctccggctatgtcgaggcgacgtataaatgggctgaggaaattgagagtggacgccctgagcgcgatctgaaaaagatgctcaatacctcgctgaaagtccgccgtacaaagtccggcaaacgcttcctcgtcatcccgttccgccataatgtgaaggatatgccggacgagctctacgcgcaggccaaagcgctggaagcctccaaagtcaccgggcagacgcagcgccgcagcggagagatcactttcctctcgcgtaaaaccgggatgcagccagccaagcggcagacgccattcctgactaacgttaagacgcatggcccgatgatggtcaatcagtcccagtacaaatggggcggacgcatccacgcgggctatttcggccctaacccgaaagggaaggtcgatcacgcggcaggcatggtgcggttcgataccagcagcggcaagcagaagtccagcgactatatgacattcaggatcatgatggaaggccagcagggctgggttgtgaagccacagccgggaaaatggattgcgcggaaggtgcgagacgatatggcaccgaaggcagcggaagcattcaaagccactatgggctggacactgaaagtgaagtaaaaaaaaagccgcgaggcgagtcgcggcagggaaaagtaggcgttcaaaacagcttttttgttttcaggcaaatggactatagacagggctcaccgtccggtcaacgtctttttagctgatatttctcgcgccacgaccgtacaggtcgaatttgcgaagcacgacgcgttttggcaggcgcatcccttggtgctcgttacggtctgacgggtaggcatccagcatgaaatattcgctgtagcgctccccggtgatcgtgtactgcttgcccgctggcggttcgccaccgttgggccacgtcagtttgccgttgggtgccacctcagggatcccgccctcaataacgccagtccgggcatcattaagccagaaaactcgctcaatgctcttgggatagcgcctgagccgttcagtcggtgcgccgtgggtcagcacgtctgaaaagccatcgaggccatccagcgtggttacacggtcatattgcccgccccagtcccatgctggctgatcctccggtaggctcaccaccatgtcgccatgctcccacaagcccatttttgcccatttcatctgggtttcctgagaggcgacgcccaccaccatttcctccggcgcatcccagatcctgcccatcccggtacagagcgggcagctcggatcagcagatccagactgcgcattacggcatgggcaggcccagttacgcgcccagaggacgcgctgaccgatattattcaggtgacggttaaagttttgttggctgaaacgcatattctcccccttagaaaatcatgctgcgcacgccatggatagcagcctgcaagccaccattcccgcttttctccggcccgtcgatgatgcgatcgatctggtcttgatacttgctcagatcgacgctcatggactcgctcaggccatcggcgctgatagagccggactgcggcaggaaagtgtcagtgatgatcttcgtcaccgccagtttcatgatggcgtcgatgagatcagggtactgggtagcggcgtccaccagcccggctgtgtagtcgaggtgaaccatctgcgggatgcggctttgccacgtcagcgcggtgaagccaagcacggaggtagtcaccagcgtggcgttagtcaccggaatgatctcaacgtgcccatacttctgatcgatgcgcagccactcctgcgggatatcaaaatactggcccccggcagacggcatgatgaagcgcagacgctgcacgttcaccaccggatgatgacgcgtgacaaagtagccccacttgtcgcggtcgaacatggtcggctcatagtcctgcggcgtgtcttttacccacggctcaccgttcagctcagcgatctggtcatcggtcggagtgctttggaatacccgcgtcgggacgaggaacacgcgtagacggcgagagatttcggcctcggcggcaatcagtttgcgccagatataatcatcggacactttcatatcgcgcagggcacccgctgacgctgccataagctgatcctcgcgcagctgcgggatcaccagctctttgataaacagctgcgaccgggtgagctcaaatggctccttaatctcagccgggaacatggcccgaccgaccgggaagccggacacgcacaggatcacgtcattgcgcgtggcgaattcagcctggtaaggatcggtcgtcccgtcgataacgatgacgatggcaccatttttcaggttggtacccgtagcagtcaggtcaacaggcgtttgcttgttggcgatcagctggccctgcttggtaatcagcgcccacgtcagggactccccgccagtcagcgcgatgggtttcccgtcttttttcagctctacaatgaccgtgctgacggtattgcgttcaatggtaatcatgcgttactccaataaaaaagccgccctgaggcggcttaacagggctttacgccagctgcaaattacgaaatagtgatagagcaggttgccggagatccggtgatggtctgcccggccttagccgtcgctgttactgtcactgtgccagtagcatcagcgtccagagtcaacacgccagtagtcggagctactgcgccacctttagagccagctaccgggctcactacataatcgaagtcggtcgctacagcgccgcccgtgccaacatcaaacatctgagcgaaagtcacagtcgcgccagcggctgcggttacacctgttttagctgcaatggtcttaaccggagcaggcggcgtaatgccagcaataacggcgtccacagcctgatccacgatatcaccgaaacctatatcagccagccccagattgaggttgttaagcacgcgcaccagctcggcacgcttatgcggggtaagcgcctgagcagctgcctcgcgctgcgcctgagagtgcaggaaagcctgcatcaggtctccaaagcccagcttggcagtgccaaggttgagattgttgagcaggcgtccaatgtcggaagcctgcgcatcggtgatgctggtatcggtcgtgccagtgtccagcaggttaacaaagtgtgtcccgaagtcggcggcggcgatgcccagattcaggttgttcagcaggtgctttagtttaccttttgaactttcagagagtgtcacaagggcgaccatagccgactcctataagcagattattcagcccctttagccgattccgctgccagccgcgccttgcgctcagcaggagtttcgcgcttaggggtttgcgtatttgcagtggcttttttagcccctgcccctttctggattttactgtcactacctgccgcaggggcttgcggtttcacatctggtttcacttcctgcttaatctccggcactggcaccttcggagtgttttcttccggcttcttaggcgcttcctcagcgataaaaccgggaatggtaaggtagcgtgccacctgctcctcagtgaggtcaggggacaggtaacggtactcgccttctggcgcttccagctgagtgaacgtcatcccgtcaagtttgcagtcagggcccatctggtgaatgttaattacttttggcatggttggaatcctcaattttcagaaacaaaagggccccgtagggcccttcaaatcgcctactggttattcgccagtatgcggacgccattttgcctgagtaggcagaatgtttttgatgtagccatggtgtttcggcttggtaatacgcagataaccaaacaggaactggaaccatgacattacaggcatcccgcctacaccgaatggcagagggatcttggtcatcggttggaactgacgccagccgattgcatccgcgccagcgccaaggttcagcattggtacacagatggtgcccggcagagtgcggttgtcgtcgtggaacttggtcttaccaccagcggagctagaggtatcaattttcacgtaaccgaccagacgcatatcgcgcagggtgtccagatcatcagcagctttcgccacgtcctgacgaccacgatagatggcgaagccgccgcaatcagtggatgccgggttggtgatggacagcacgatttcttcgccagaggcaacagtaacctgatccacgatcaccgcttcggacaggccagcgccggaggtgctgatacctgcgatagcgtagacgtacttaccagcacgtttgccagtgaagcgagccgcgccgttggtagccgctgcgccagttgtcgcgcccggtttcagtgcggagtttttcgccgccagatccgggttggtcagctggaacacatgcaccatcgggttggtctcgtcatggataaaggtatccatgtgagttttcaggatgccagtagtcaggcggatcccgttaacatgaccaccgatagttggtgtgttctggccttctggcatccagcggaatgctggatctaagcccatgttcagatcgttctgaacagagttaggcaggaagatatcggttgactggccccagttgccgtaggagttaacttctacgttaatctgagacatcggctcaacgctgttcagcgcggtaccgttcaggtcaacgatgtgctccggtgccattttccccgcagccacttctttgtcgatctgggtaaagataccgtcaaactgcgtactaacaacgtcagcgttaccatgataaagcaggtagttggcgtcggtcagcagttgcagtgcgccgttacgttcttcgaccgcaatcggctcagcgatgtttttaccgatgttcaggacatagccgacctgacgcagagacatcaggaatttgaccagacctacttcacggctgtattcgccctgtgcggcacgtacaacgcccatctgggtgttggtagaaccaccaaggaaaccaccgacagatgactggcggctgtattcgtcaacgatgttgatcgcgttggactgctgcaacatgttgaacagcgtaaagtgcttgttctcctgaatcgtggtcttcatcgcagtatcaagagactgcacgcctaacgcgccgccgccctgcaatttgctcacgtcagtctgatagtccgaagcctgaagcgctttggtcagctcctcaaactgggccatattaccgcccagagagccgccaagagcagctgcgccgcccggcaatgcgttctggaacagttgggcgatgttttgcatcgtttactctcctgagtagttaaagtattcccgaccgtagagcggcgggagtcgggaaaaattacaggccagtgcccagcactttcgccagaatcgccggatcaggctgataaccgttgcgcagtgcgcagtcgatcatgttcagctgcacgccagtgatcttgccttcgttgtatgcaacgttggacttaatcatcaggtcagcgccagtgatctgggtatcttccggctgctcagtcgttgcctgagtacctgccatggattttgccatcacgacaacctgagatttacgcccggcaccctgagcgcctgcattaatctggttctgctgcaatgatttgatcagctcgccctgagccgcgatggtgttgcccatgcgctccatcatctgcatcatcagcgggaaaccagtattcagcgcttcgttggtgctgtttacggatttttgcagggtttccagcacttcggtggcgtcgatcatctgctcaccatttgcgccttctaccgcaggcagagatttagtcagctcggtgttttcgccctgacctttggtctcgccgttctcgtctttgttttcttcggtgttttcaccggaaccagcgccagcgccttcgccgttgttggcaggggattcacccgcagccgcctggatatttttgtcatcctgagcggctggaattgatttcgctaaagtctctttctgcgaagcatcgagagtctggagcgtttccagcagatttttaaaggacataatttagcctctttgttgtaaggaaatatcgctcagaaagcgatgcacccaagcagccgcctcggatggcgacatactaaagtttgcggcgcagtattgcgccagaccttcttctgaggtcaggtaatcggcggtgatagcaccggagattaacgcgacgctcagctggtcacggaactcgtaatagctgatcggctggttgccgcccgtatcaagcgactgcacaccaaaggcaccgccaccagtcagctggctcatatcgctgcaataagacgcctccagcgccttgctcagcacgatcccgcccatggatttggtcagggtgccgataggagacagggaggctgtgcgcagatgttggttaactggcgtctgggacagggcgatattcgtccagcggactttatcgaccattgtgactttttgctgggtttccgggtctacctgcacgcttttagcgagcacggcaccaccgacagaagggtaccagcgctgaggcggattaagctgcgtcattgattcccagaccatgtttgcattctcagccatcgggccagtgccctcatacagctgcgcttttacaaacgtggtgttgccatcgatcttgacatcgaccgggcgaccaatttcgtagcttttggcttctttgagcgacatccccagcttttgcccgataacggtaaagtggtcaatgtcgatgttaccgaactttaaaaacaggtcggtactctcagcgagggccttagccatgatcttctcattcgtctggtcgagcccttcattggacgcctccagaaagataaaacgcttcccgccctcggctttcgcgtgggctttgagcatcatatccatacggataaggttgtcggtattctcggtgtcgatcatggggtttgccctttcaaaacatgcttaaattctgccgtcacgacgcaaatacgtcatgcaaggattttttcgagcagcgccgcaaaatcaggatcgtcacccggttgcgctttcgtggtggccacccagcgcccccggcagtgtggatgcgccagcccggcaggaagttgccagagctcgtcctcagtccgcttcaccagcttcccggcgacgcgcttatatggcgacgctgagcgcccgatattgtttttaccgggccagatcatcgtcgcgggatctttgttggggtaatcagccggaaccaccgtggcgatcttcccgtgaatctttttacagaatgggcaggcggtgccgtacatttcgacacgctccacttttgacatcggctcgcacgcggcgataaagccctgtagctggcactctccagcctctgtgacggcgattcgacgccagtccctgttcagctgcgcgaagttgtcaaaaagctcctgctggagcgcctgctgcgttcccggctcccccagctgtttgcgctcctcgctgcgcatgatcacgccccgcatcatcttccgggtgttgtccgccagattgaccacgttctcagccgcgcgagcgctggcaaagtccagcgtggtcttttcgattttggtcagcggtacgcccccggactcctctttggtgttgggcagagccatcagcagcttggcggcgtcgttagccgtcagctctttttcccagttagcctggacttttcccagcagcgtggctttggtcgccagccagtcggcttctgcgatcaggacatccttcggcatgtaggtttgcaccgtcagctcgacggcgagaaaatgatcgtccagtgtccactggtcgaacggcagcacgcgcaggtacagatccaccagctcgcgctcctcctcagtccagacctgcatcatgcccacctgcggctttggctgcggttttcctgccttctggttcttccccagctcccacgcctcaatcgcctttctgacgttgcccagatgcagcaggccgcgctgggtgaacagctccaccagcttgcggataagcgggctttcgtgcggacgccagatatcgccatcttcgccaccgcgaatggctttgtgcatggtctccagcacttcatttgtcacgtatggcgtgagcgatgtcagatcgagcgtaatgatggcgtagtctccttaaattaggtgccccccttctgggaggggcgtgcaaccattcggctacccttgcgggctggttgctgcgttcgctggcacagtcacgcagaggcccatcagcctcaccctcagtcagcgtgagggaggattccccggaggctcaacctcctccaagccccggcgactagcggggaatgcacaggtttgctttcgcaatcggagcaccaaaaacttacaggtcgggcagaccaaacgatttgtagagcccttcctcgtcgaggttctgcaatgtgttatgcagctcatcgaattttttcttattgtcggcttgcagctgctcctgctcggcctgctgctgtgcagctgcgtcggcgtcgtcagggttggcaggatcagcgcccagctcctcgcccggctgctgtagctcggcctgctgcgccatctgctcggcctgaatatcagcgttgaccttagccatataaggctgcatcgaaacgctgttaagcggggagttggcccagtcttctttgatttcttcccagttgcgagcgcggcgtgcttcgttgacggtaaggagcgttttctcctcgtcccacgcctgcttcggatccttctcatccagacctgtccagcggaacacgtacttatctgagaagtcggaaatgatgtaatcggtgaataagtcctcaaagtgcgacagcagcggtcgcaggcccttatccttcgagttgatcagcttctcctccgtgtcactgccggacagcgaactggtaccagcagtgaaggattcgaagttgatctcgtccggggcgatgccataaatagcgcagatgatcgcggttaagaacgtcatccatttggcaaacatgatctcgttaacgtctacgccaaagttttcaaatttcgccgtggattccgaagttttggaaaccatgacgggcaatgtccatgcgttattgatgcccttcaccatgctattccagtaccgcttaaaggagttgagatcctcggtagaatagtcgccggagagatggagcagacctttcgggatggcgttcgagtcgaaatacttctggttgtacgtcatggcgttcaggaagcccgtgacggtgtttaccagcagctcagtttcgctcatcccgtaacctccgttcagcacatcggtgcgggtgttgcgcggaacatagatcaggtcgttgtaggtgtaagcggtgcggatgttcccctgcaccacctgtaaagcaaaaatctcatcatcgcccttgtagccgtcctcagtacagaggcggatcgtggcaccatcgacggcataaagcccgtccatgcctagcgagcggtttttcttgaattcggtctcaatcggcgcggagtccatcaccagcgagtcgcgcaccagcttgctcatgaagcctgagaagttatcgcgcttgaggcgagcacgcacgcgggggttactctcccagccgcagttttgcatgaacatttgcagcgcgttgatggagtcctgctcaggcttcgccagccgctgtgagccattctgctctttcaagcgaatctggaagccggggcccacgcctttctcactggcgcggcagaagcgtttgatctggcggatgcgggtcatcaccaccgccgacaggattggcgtcttgtccaccatgtagcgcatggcatcaaagccaaagtttgtcggacgctcataccagtctcccagaatctgcacctgacggtcatccagccagacagactgcataccttctttcttgccctcgcggacagcctgagaagggtaatcgaccagtgtatttttctggagggacttgtaaaattcctgatcagcatatgactgggcaatatgctgaatcagcggagccagatccggcacgctggaaggcattgcagctttctgcgcttgcgccatcgcatcctgctgttcgtcggcaggcgcggcagggttgtgcgcggtttggatggcgttgtcagacatacggttaacctttgcaaagtagttcgcagagagtgacatcacgacatcacgacgcaaaataatttaaataccctcttgctatcatcttttttgcgtgctttaatccatcccgtagcgctgattgggatgtctttcgaaattgcgttttcattttctgtcaatgtcagttatgggacggaagacatcaaccaatgagcgcttggctttgactactcaatacggatttgtcgttatttcgcgtatacggttgtcaagtgctcagccatgttctaacccgcgcagtattgctaaagcccaagtggggccgtcttcaatactcgcggcagtgaacggcgaatggcaagctactggcctgactttccttctttcaaagcaaagattgaagtgggcggcgtcggctcattgaaacaacggcgcaatcgggtgaaaatcccgttcaaattctaccgattagtgacgatgaaaggggccttcgcgatccccaagtaattggcaggttgccttaggtcacaagccgcagcggagattgcaagcgaagctgtaggatagaggttcgactcctctgatcggtgccatttttgcggttacacaagtgtgcagatagcatgacgaggaaaggcgttccgtgcgacgctggaggcgatggtagggtaagcaccctctcctatgactcacgactcaacctctccgggtaacgaccggagccgcaaaacagattgaagcgtagctcattggcagagcagcacacggatgcggatccgcgccagcacaaggctccttcggggtgtgccgctggctccagaagtgtatgtaactggttcgatcccagtcgcttcaaccattttgattctgtagctacagcggtagagcggcgcactgttaatgcgcgggtcgctggttcgaatccagccagaatcgccagagtaatcatgggttggttacaagcctgtcagaaggcaatcccgccccggcttctcctcaggtcgccggggcaccttcccagaattaagggcagtcccttacttctgcgtcggtaagagcggagaatcaggaaatttcgaccgtagtaccaaaacattgcttccttgccgcccccgtgggcggcttttttttagcctgaggagtaacccatgaatatctttcgccgcatcctgaataaaatctttggcatcccaccagtgccaccagagccgaagatcgagccgccaaagttcggcggtgatttcccgcgcccggtctccgtcaccatgaaggctacccagaccgtcaagcaggatccgatggctgcggcggtcgcccgtgcaaaaagggacgcggagaaaactgccgtaaaaggcaacgtcagcagcgcgagcagcagctcaacacagcgcccatttatatccctgttagatccgactcatccgctctatccttttaatggcgtgcgggatgatgatgcagccactcagcaccgcgtacagcatcaggacgcgacgacgatcagcgataccacgcaccgacacgtcgccagccattctgagccagtgcgtagccatagctcgcacagcagcagccattcaagcccaagctatgaccatagccccagccatgacagcagcccatcctatgacagctcaccgtcacaccacgacagcagctggtaattaatcgtcacctttcgaaatgaagccggagcagccaatatcctccggcttcacctgcatcatgatctcatggcaggatctggtctccgggtcgtagttcacacagcgcccgcaaacatccccgcgatacttcacgttgttcacctcatccatgtagctcaccagcgtctgatcgacgccgatatccagcgggctcagtcgctcgatcttcacctgcggggcatccggcagaataaacgtactggtgccatgggcgcgactccatgcgacatcgcacagcaggtttgcgtaggagaagtggggatcgatgccgattttcttcacgctgcgcttgtactggttcgtttcctcgtccttctcagccaccagcgccgttttggtgaagtgcgtgaacattaccggggccacggcttccacgcgcgtgacgcccttctcacgaatctcctgcaccaacccctgagggtctgggatgaggcagattggctcgtcggcagtgaagcgggccattgagacctgcatacacttatactggtcaatgcggacggtgtagcgatcctgttcgttctcgtcggtgcgcacatcggacttgtccagcttcatgctgtcattccactggatcatgccatccgccacggtgccgaagctgttacagatgaatacccggcctttgtgacggttggcgaagcgcttggcgtcgttgtagttcgggttgatttccaccacgcagcaagccacgccgtactggttcatcagctcgctacagcgggcaaacggatcctcgctgtaaatcatttcgatgtggacaattgcttggtggccggagggcagtcgctccttgataaccaccacgttaaactggcccatctggtcaatacccatgtagcagttatccgcgcgggacttccactgcacgccaaaacgcaggccatgcttaacgcaattcgccaggtgttccagcgttaccggaaccagcgacggatcgaggaacggcttgcccagcttacggttatagaagtttttcatatccgtagcgttgttgaaggcggaaataatctcgccggggctgattgtcggtgacaggaactgcgggaagtgcgccgaccggatgcacatttccccttcctcattctccggcgcatccgggatccattccccgcgctgcgtgtcctcaatccatcctccgcagctgtagcagacatatcggtggcgtctggtgtccgggtcgtacttaatgcactgcgggaaatagtcatccagcggtttcttttcgaggcagtgcgggcattcggtatggaaacggtactgggatcccagcttgtaccagtggtggatatcggagtcgggccagttggcggtggagcccatcaggctgtaacggatcggggatgcagatagacgctcgcgcgttttctccatctgctccagtgacatttcctgcacctcatcgaagctcaggacatccatcgggatggattcggtagtcgcgcggcccgatgtccagctgaatacaaacatcgcctcaccgatgcgacgggtacgcacgttaccctcacctttcttgcgaccgccgcctttctcatcgtcctgcaccatcagcgcatgtacctcaggtacggtgcgcacaatcggcatgaagcgctcggaggacttgatccccgccagcgcggcatccggcaagaacatgccgatagtcatcggctggaagcgcaggccaaggtaaataacagcgagcatttccatgacggtaaagcccacctgcgcacacttcatcagcaccagcgttttgcggtatgcctcctcgacggtgctggggatctggtcataaatccacgccatcgccgggcggttgtccagcttgaacgggcgaccatccactttgaggcccgtttcgcccagccggatgcaccactccagaaaggtctcgtttggcttgaggattttctgcgaggcggtcaggacaaaggtcgtatcgaggaattcagcatcgtagcgctggcgcttctcatccccggtcgtgttgtccattttctccaggaatgccgcgtcgagattatggcggttggtctcggtcggcacgcggcgtcggaaccagtcaggatccagctcggcctccatccacaggcgataaaagtcgtgattcttcccgtaggcaccggacaggaaccatgcactgccgtggtactcgcgcaggcactcagccagcgtgtcaccccagatctgcatgaagttgtaaatctcgcgcacgtcatcaatgatcatcaggccatactgcccattaacctctttcaggctgtcagccgcgtaaaggtcaatgtactggcccgatagcagcgtgatgcgcctgctggttgagctcttgatgaggggatcgatggcctgtacgatccgcgtgcgaacctccataaggtctttgtacgtagcgctcatccacatcgccggggcagggttattcatgatgccctgtttcccagccaccagcgcctctatgccaagcgttgtttttcctgccttctcgcccatggcaataacgttaaaacgcgccgcacggtcgatacagacctgcaacgcgtcattgagaatgggcagcttaattttaacggtcttttggcgtgccattgtgaatcctttggtaaaagggccccgaagggccctgaatgggggttatgctttgagtcggtctacttcatccgccagcgttttgacggattcgatcaggtctgcgatgagcgcgttttgagacacgttcagcaccccgttaacctcataggtatagatcgggtcaatcttctggagctcctgcgcgatgtagccacggtcatggcgtccgtcatgcttccagtcgaattcccgcgcaacaatctcacggatgcgagacagtgcgcccggcttggcatcctccgcattatctttcagcgcgatatcggaggcattaaactgaactgtgcccaaaggcccggtaatatcaccgttagcttggaaagcccagtctttatttacccctcctgagttttgctggagggtgatttggtaagcgagaagatccgtactggctcctcggacagcgccagtctgaacaaagccattacaccattggtagcttgtccatcccgtccaaccattcgggatgctgctctttctgttattgagctcgactctgttttgctcacctgctcgcaccccacaaccaccacccgcagcggtatgcagatcattacaggtgacgagcgcggagatatccagcgcgtttcctgtccatggcttgatgttattcgccagcaaataacgtggcaccgtcaagtcaccattggtatcaaagatgaagttttggaaggccccggaaacctcattttttgcctgaatgacagccatgcccacgatagatgattcagtggtggcatatcttccgctggctaccagcgaggccgaaagtttatccgcgccaccgatggtatagcgggaatagaccatcccgcccagcacgctcgtattagcacccggcgcggtagcatcaccagagatcacgctgaaattggtgttcgctgactggaaggcaccagaggctcggatgatccagatgcccacaaccgagttcgggcgcacctcagtaccacgtccatacgcggggttagatcggctagcattaaatttaaacccgttataggttcccgctacaactggaccgggttgaatattgttagggaatgagtccccttgataaacggcgctttgagggtcgttaaccgccgcgaatgcaccagcacctgagttgccgataagacccgtaatattcggcgcggcgttgtatttaatcgcgcctacgccgccgatctcgctagtaaaatgaccaccaccatcaccacgcaggaagttagcccccggagtaaatccatcagcgtatgcgccattaagatcaggcacacggaatttccctgtacttgattgcttaacatatgcgcctcggttttcacctttccgcagaccgtcagcgctaccgctgttttgccaaagggcttccgttaccgtgacaaccctgccagaattcaccaaagcatacagatctgcggttgcaggatctgtttggctgcattcctgaccgtcggcggggatatatccaacgggtaagctggcacgcgatccgttccaccattccaccgcgccaacaaagttattaagcacgccattcatcgttgggccagagccgcctgagtttgctttcagctggcgcagcgtaactgcgtcataatctcctgctgcgtcggcattcagcgtaagcgggccttgcagacctgtcagctgggtgatgtcactattaacaccagactgtgccccttttctccagtcggtgaatacgctgccatcatagctgcgcgaagcaatacgcccacttttagcgatgtaaacctgagtgacgccaccagatgcgccgaacgggaatacagtcagctgaccgggctcatcaaacgggaagttgttggctgcaacagcaccagcagcactggtcagagataccacgccataatgcgccgggagaatgcggtcattcaggttgataaccgttgaaatgccatccatctgggcgacggctttcacttcggatgccgcaggcgggttatcgctggtatacatccggcgtggtgcgctccagttggtcgtcgtgcgcgtgatgcgataaacccacgttggcgtcgcgccctcagacgcgaagatgaagacagtcgatgtgcgatcctcgttgatgccctcacagtggatgcgccacgctgtagcaccagcgccagtgatggtcgccgggaagccattggcagtaatcgcatcggcggccttcacgcgcatagtttcacctacgcgccaaacgtgcgaggtgatcgtgtctccggtggcagcgaagtcgaagtaaggcagtttgatgcccataagtccagcataacccgctgtgagcaccgccccgtcgcgggtgatggttggactggcgatctcctgatcggtcagggagcgggcgatattcagcgctacgcctccggtcggctgagcaccgctgctgtgtgtccagtcgattgttgcaccgttacccgcgatcagtaggccagtccatttgcgcggtgcagtgctcggtgcgatgttaaaccagatctcataggtgtcggctgcgacctccaccagcttaccgccaaggatggtcgctgaattcgcgccaagattggtctgagcagtaacggtgatgcgtgccggatcaccgacagtggtcacagagccgtcgcctgtctgcatgacaatgttggcgaagccagtaccagtcaccaccatcagcgtaatggcaattttgccctgcgcgagattggagatcttgcccatcttctgccagctatctgacgtgatatcccagtcagtgagcatcacggcatttttatccagcatggtcagagcatcggtcagcttgcccacatcaatttttaacgggttggtcaggtatgggacaggaagcccaagccggggagtagttttgtccaccatttccgggatctctcttgttcaggaatagcggatattctggaatcactacggggaaataaaaagcccggacagtaccgggctggaaggtttaccacttgaattgtcgctgatcgtcctcgcaaaactcgaacagcttatgcacgccccagtaaacagccccggcggcgacgaccaccatcacaaggcccatcagcatggatccgaatcccagagccgcgaggccagaagtgatgcctgctgcactcaatcctgaaaccttccccagaaggctgatcagcaggataggcgttcctgccgctgctgcacctgctgtgacttgttttgccactgtgtacccgttcattaccgcccctttttatgtgtcgctgagcggtgctgtccgctgtagcgatggtttccgtatgcctgctcgtcacgccagttaatctgctgctgacgcttaccggaataagcggagtaaggcggttttggctggagtttagccattacatgccaaacgtcatagcaggcatcatggaaacggcgatccgttgtcgagtccttgaaattgctgtacatcatttccgcgacgtactgcgccagcatggattgcagctcctcgcggttgacgaacactcggaactggtaatcgcggtgatcgtgcgtgaccacttctttggtcgggaagtatttgttcagatgctctttacggcgagcacgtacttggatcacttccgggtcttgtttgtctacgacagcagacaggaagccatcagataaaatcagccacatggcgtattcctcaggttggattggttaacggctgagataatacgtcatgcgtgccgtatggtcaatcttttttcttacctaaatacgcgtcaagcaccatttggtcgggcttcatgttcattagctcgcgcagcttgttttttggtaccagctggacggcctgcgtttcccagcccatcgctaccggggaaccaccgacgcgcttcgccagatacatgcgagaaacagacgtggtgcgctcaaagtcacccagcacgccagtgatctcgatctgtagcccggactcctcccatgtctctttgatggcgttctgctggagcgtgagccccggctcagtgccacccttcgggaaagtgttctggtagccgccgaaagcgttggtcgggctgataatccacacgcgaccgtcaggctcctcaatgatgacgccggacgctggacgcttcccggctggtaccattaacggctgctcggtcatctgtttggtgcccttcacaaaggcccagcccgcgtcggttttcggtgcgccagtccacggcgcgaccgggacgccattcagctcctgcggtgctgcaccattaggcgtgaaggtggccacctcgttgctcgcggcccacgttggcgcttcggtcggtttgctcggatggttaaccacgacgcggttgcccttctcacccagtcgcggatggtggacaatcttcgtcggtagtcctttgctggcggtagtcctgtgcgtgccatacggcgtcgtgggcagcgctggcttgcggtaataggctttcttggcctgaggcttcgcaggcgctttgggggccgcaggcgcatcaggtttggctgctgccttcccgttgtcgtgcggcttcacccatacgccatcgctccggcgatagcccttcacctgcgctttcaggaaaagtttagtcattgccttccactcccagcatccattgcgccatggattcgacgctggactgcacgcgggcggcgatttctgcatccttcccgcccttgtcaaatgcctggtaaatactgatcgcaaagcgggccatcgcgtgcgcgacgatcagcgcgggatccgtttcatccttcgccagccccttcacgttctggatccagcgcggcagcgcgaagtcattccagcccggcagcacgctaaagcctgcggtgttacccacaaagatgttagcggtgttcagcgcctgcgcacggtcggcctccagcgcttctttctcagtcatctggttggcctgcaccttagcgatgcgtcccacgatgtccttggcgaagttattcaggatggtgcgtgccacgttgatatcgcccagataaacgctgccatcagcagcgttcagaccttcgataaaccacgttggatcagtatgtcggttcaattcagccacagagcccccttatacgctcggcaggatgatacattccacaacggtcatgccgctgccgccaaagccatcggcgtccttagtccccgattcgttcaccttagtgatgagtaggcgggtattaggtggcaggataatttctttttccccggtatggtgcgagatagatccaccactcggaagcgagccagcgcccgcatagataccttttacgccggggcctgctgtcattttgaggtgaatattaccactccacacgtctggactgatagacgtggacataattgcaggctccatgatgaccttgccgaccgacgctttcagcttggagagatcaccgctgcccagactgaatttgcgcccgaacgtggtacccggcgaaatttcatggcccataccagacagcgcctgcgctgctgctttcgcttctgcgcttgggttgcccttccacagtccgctgttcatctgcttataactgctaccagtatacgcctgcacggcctgcttttgtgtcatcggcagcttttcccacacttcctgtgctgctttggcataagtgtttgtggtcagcgtgccagccttgaaagtggttttagtaatgccaaggtcttccggctcaacaatccccggatggcccagcaccagcaggttcccgatcttgtctgcatcgttaccgctccagttttccggcttgtattcttcgtgcatcgaatacagcgggtgatcgccgccgatacggaactgctcggcttcatgcccggtaagctggctcttaatctcgttaatcgcctgcatcgcgtagcctttgatgtgctgcgatgggtgatcgagcactggcacctgtccggtaacagctccggtgtctttgtcaaaggttggcgcggtcaggccgcgaatggcttccgggtctccggtcagcgccgcagaataaatggcctgcgccgcgtcgtggttccctttgttcaggaactctttggaggacgggccggatttgccaacgccagaccagttgaggaagtcaggcggggtactgattttctccggcttgaatttctgcattttgatgatctgctcggcttccgggtacttctcagccagatactctttgcgcttgatgagcgtttccaccagctcttttttggccttctcatcgcccggcccatactggttgaccatgtgcgcgattttggcgtcggagatagccagcaccttggagacagacgcggcgatatcggcctcagtcatgccaccgaagacggcggcgctgttcgcgttcatcttcggatccatcagtgactccagctccttaactaccgggccaaattctttcttcgcaccctgcgcacggaacatcagcgagccgcccgcatcgacgcggtgaatggtgccgtcatctttcagctgcacgttgtctttcgccagccccacgacatcccagttacccagccacgcatcaacggcaaagccttccagcatacccttggccttcgccagcgctgcatgggttttggccttcttgatgttctcccacttcgaggcaatagccattttcccgtccttggtgacgatcatggcgtcctgcgcggacaggccagcggcgctatacagtttcgctgccagcacctcagccttggcgtgctcctcgttatccgggaacttcacataccattcctgcccatcggcgtccttcattttcatgccttcattcgaaccgccttggttgcccccggtcactgtccactcatcgacgctgatcggctctttcttcttccactggtactttttgacctccatcgggccatcagcggcaaggccattctctgccgggttgctggtcgcggcggtagcattcatcagctgcgcgacgccattcatagcataggtgccattcacctcagggttataaccggacttaaccttgatcccattagccatcagcatcatcgacgcatattgcgccagcgcctttttacccggcgcggtcgggccatactccgttgagaccttaattttcatcccaaactcgccataaatcagcatcgaaccatcggctttctgcatgatgacgcctttggtgccgccgcctttggtcagcttggctttgaggttatctacatatttcatgtagtgatcctgctgccaagcgctcaggccaagcgcagcgaagtcaggtgctgggatctcgtcaggattggccctaacccagcgcccgtttttcaggatcagcatcccattggcacccggcttcatgtcgccttctttcgggccatcgccttctttctggccctcgtcggctttcttagcatcttcttcggctacggtgtttttgatagccgtcaggatcccttcgatagccacaggagtaaagtcgttgatgataagcacgctcttaatggtgctgaccgcatccactttgtccgggttggcgtcgtagtattccttgcacgccaccgacgccttgacgaccttttgcagcccggttttggtctccgcgatgctcttgatgtcgtccagcagtttcaggtcgatattacccagctccggcgcggcaggttcaggcgcaggcgcaggctcctcagctccggtgatctgatcctgtacaaaggtcatggtgctgatcgcgtaatccgtcatgctcatcttgaccacatcggtgccctgattcgccatcagcgcatacgcggactctttgacgctgttcagcacggcctctttcatttccggcgagtcggtgtacttcgccagcatcgccatcgctgccagaccatccagcgcatctgcatccgccatgctatcgcccttgtaactggctttcgggatcccctgcgggacgccgtgcatgttgatgctgtctttcagtatggactggaggacagggatatgggccacgttatcgcctgcggccttcacgatgtcctgataggtggcagggttgtcgcctttcttcgccacgtaatcctgtacagccatcagcgtttcgaggttgtctttggcgttgttgaagaccagcccaaggtcatacatgtttttcggcttgcccggcgcagcggtcagcttgtccagcacctcagccatgtactccttgtacttggtaccgttgatcgtggtgctcggcgtcacgttctgctcatatttcatagcctcaatgagcagctttttgctgttctcatccttcgccagtgttgcagcgatggcgtagccctgaaaatcagttgcctcggtcgagtagaaaccaacgtccggcttaatcggcaggttgagcggcttgccatgctttttgaagtaagcctgaccgatttcagacgcagcgtagacgtgcccgctgttcattttcaggatattgtcgataacagtcgtgtacgcgcccttatcgccatggttatccttgatgaattccagaccgatgctggtcgcatcatcgccgttcgcgccagcgagggcctgtttgagcgccacaatctcgctgcccgcgctgccattggctgaggtctcaggcatatcctgctgtaagatccagtgcccattatggaagaccagaataccgcctttaccctgcttggtatcaccttctttcgggccatcctctaccagccacttattgacctcctgctggtacagtttaacctgcacagcagctggctctgaaaggtgaagctcgctcagctcattaaagtgcttggcgatcacatcaggatctgattctttgcctttgtgaacttcttcggcaatgacgttatagagggtctgcactttcgtgccataggttttcaccgtgtcgctggttggtgataccagcggtttttctggctcagtcccgtaagtctcactccaccacttaccataggctttcttgccagcgataaagaactcattcgccagctcgttaaacccattgtccttcatggcctcagccagcaccaccagctgcggcgcatcatgcccattcgccgtcatccagtcgccagcaatcgcgtcggcctgtttttcgtccttggcatctgtcagcgcatcaaaggcgctttcccacatggcgtaatcattcaggatcgctttcttctcctgcttacgctcatgtttggtggcaatctgctcggatttcgccgcagcctgagacttctcggcccatgaatcgtacagcttcccgacgctggactcggagaaggccagatcgctaccgtaataggtagacgcctgctcaatgaatgcctcgccttttgtcttcgcccactcgttgaactcagccacatcggcaaaatccggcagctgcggctcaggggttggcgcacgctcctgcttgatctgcggtggcgtcggcagggatttcacggagatatcgcccagctctttcttggcggcggtcacggcttcgatgatccacgcggacagatcaaccttctggaaggcatcaatcaggttctggtcatcacggatcactgtcaccatgtcgttgatgttgtccacagccagcgcccagttacccgcgttgaggtcattctggatgtcctcacagatgccgtcgataaacgcatcaccagtctgcggaggattggagaaagtcttcactccctcaggcttaggcgcagcagcaaggcccagagactccgccagattgaccgcaggctctttgccagccattacctgctggtaaacctcattctgcgtgttggagaagccggagatatggccccagtcgcccttctcgttaacccacataccagatcccggattcttcggatccgcgacgatgactgcgctggtattggtcgggtaaacgcctgcgtctggagtcgtggacagcacgccattccacatgttcttgatgacgttttgctgcttctgggtcaggtgattcggcttgcccagctccaccagctcggtcgggtactcgctatggtgatagtcggaaatgtagcccagattgtccggggttttggtgttgccaccaaagccgatcagtttcaggtactgtcccgcttggaacggcttagccagcggctcacccttcttgcttataggccatgcggtcgcgtgccccatcagcactttcaggtacggcttaccgtccttgtcgtaggtctggatgattgagcctgcgggcaggttcggcatatcggagatcgacagcttctggccctttttgaactcaccagcgacaggctgatccttgagcggctcgccagtctcctgattgtgccagcgaccgtctttgaaaacctgcatcccgtttttgcccatgcgggtatcaccttcctgcgggccttcctcagcccggacggttttctgctgctcaacctctgcgctggccttctgatccttttctgcctggctaaactggcccagcattggatgcacggcgtctttgccgataaccactttgatatccgggtagcccagcgctgccagcgcgttattcgcagccttggcgactttgagcccgtaggtgttttttccgtatgtcatcgccagaatgccgttgatgttgcctacttcgccagcggccttgatagcggcgatctgcgcgttgtagctcttggcattcttaatgttctccgcgacggcgaactggctccagtcgatagcgtccatggccttcttcgacacggatgctttcggggctggcttgccttcggcggtgtccggctgcgccggggaggtagcgatgatttcaaccgcgctcaatgggctcggctcctcggactgcaccagcggcttattcggattctcacccgtcagcagcgccagcttttgcccgtagaggttcagcagctttttgctgttcggggtgatgcccttccagcttttcgccttgctcttgatagcttccagctccgccagactggtggcgtcgatgaccttctgagcctgcgcctcatacgcggtgcgcacgccagtggagtttttgccggattcaaatttaggcatgacgatttcgcctggcttcggtgcttcggcagcaggtgttgaggctttctggacttcttctttagctgcgttttttttctcaggtgaaggagacggcccatcttttggcataataaggcttagtttttttgctccacccggttcagttttaaagtatccaaactgcgtaccgtaattctcaatcgcgtgcagctggtgctgttttaaatcaccaatctcaatagtgatgacgttattttttactttgtatgcttcaatcggtggcagacctaggtaactctcaattccagaaacaatggcttgttgtttggctgtcaaattacctgtagctggttttgttgctgcctttgcctcttgcgctacggcttcaatggcctgctcagccatctgatcgacggtctcaggctctctctcgtatgtggcgatggcagggtgctcacccgctttctggcccgcgctgaccttctcctgcgagcccatttgctccagcagatagttggcaatcgccaccagctttttaccgtgggtgttcacgccataggatgatcccagaatcgccgcgatatcgccgttggcagcgtgctgcaacaggttcgggacgtgtttctggttgaaatgcttaatgtctttgttggtcgcctctttctcagcaggatagagcagctggctcgactcctccttaggcatggcgtaaggcttatggcctttgccaccagctttagggtgcgcggctttcggggcgttcttgacgcccttcatgtccggcgtggttttcttccagcgcccattgatcagagcatagcccgcttggtgggcgaatttttgattaagtgcttttgcgaggacaagcatggtggccaccattcaacgaataatggcccagtgtggcatcacgactaattaacgtctttcaccttcctaccgaagcgctccacgcacgcgagaaacgcctcctgtttcgtgtggcaatactccgacagcatcgtggagtgtttgccgtcatgaaactggatctcccacttcgcggatccggtctttggcgggccgggccagtcagcggcggcgtcgtataccgcctgctgctccggtgtcatctggaaactcaacggcctgctgccttcttgagctccatgacgatgcaatgaagcgtgtccagctgttcatcggtcgcatgactcagcagctggctcaggccaaatccaccgctcatttcattctggataacgctgcgcatcgctgccttgcgctgctcgtaggcaaagtcagcctcgtcacggtaaacgtcaagcgccggatatccactggtctgcgggacgtggttacgattcccccagtccttaatggcaatgcgctcctgccagcattccggcacgctattgctctctttggcgcggtcaatgtctgattgccgggcgacgtaaagccatttggttcctttgcggacaacaatcatgatcccgcgtggagggctgcgcctatcgcgcgggccaataaacagggtgtcgccagatttcagggctttcaggtcggtttctttcagcatgggggaatccttaaattttgattaaatgggctttgtgaatacgcacggtgccgtaactgtagcggcctttcttgcggatattcagctcgtaatactgccggaagtcgatccccggctcattccagttaagagtcacgaaaatgccatggacgtgcaggacatccagcgggcgatcattgccacggataaatacgcggtcgcctggcttgagctcctgcttggtggattgcatcacctccagcgcaagatcagcgtctacctcagtcgcatggtagccagcctgccacgtataccagccattcgcgccagctgcgcggatatggtttttaattgagttgatcatgggttggttccttaaatgccgcatccctgcggtgtggttattatgctgcgataccgcgctgcccggtgccgattgccagacgagccttgcggtcatagtgcccgatcaggcccatggtgatcaggatgccagccgccagcgaaataacgacgagcagaatgaccagctgcgcctgcttactgtctttgctgtctccgcccttgaatagcttgctcacgctatcccacgcgccggacactccaccattagccgcgttgtagatgttgtgggcgctggcgaatgtgttccatgctgctgcccccatgttggcccagttgcgttcccggtatgccacgatccagctatgtacagtgatcagcagccctgtaccgatagccgggataatgatgcccagataccagaggctgattgccgcctgcgcatatttctcgtcgaggtgcccggtaaggtacgccgcgtatacttcaatgaagataatcacgctggaaaagccgattgcggcctgaatagctccgcaccagaccagcacccggatccagccgccaaggcgtttggactcggcccacatcgtcccgcaggtcttgcagttgaaccagctgatcagcaggttgagggccagaattccccacagcattaacattcccattttgtttcctttgaaaagtgccgggagccgcccggcgcggttgttatttatctttctcgcggttgtagcgctcatgggttagcagatcccatgtatcgccattatcccggctcagcaaacgccagcggatgccgacctttaacgagataccaccgctgcgcttgaggtgggttattgctgcctctccgcgctgccacatttccagaatctgcccggcttttatcagcgcctgagcgggaattcctttcattgccttgaacataaaaaagcctcaccttgggttggtgaggctatattattacgtcatgggtgacgtgtcaacgggtcggcaccacttctacaccaccgttgtagtagtcgcagcgcacccacatctgaacatccggcctgaaccgcgtcgggcgctgggttcgccatccctgccacgcccctgactcaccttttgcgtaaatttccagctgccctacttcaaccgttggcaggtcacaggcacgcatccagcgatagtgtggtttggtgcgacgaagtgccgggccgaccgcagtatgccagtggcgcagctgtgcctctgtcagatgctcaggccagcgtggcaaatcggaattcagatgctgagggtcaatctggaacaggtacgcgttatacgctgcctcgcccagagtcatcgctttagctcggctcatatcagtacgtcctgaatccgttgcagttgcgcaggaagtccacaaagtcggccttaaactctttggcccggtcggcttcggaactaaaccagcccggcgtcggctcccacgcttcgatgatgtcagccatcttgccagcagtgcgcggagagaccacccacgggtcagtcgttttacgctgctctacctgcggcagcttcgccatgcccggcagaaataccagcgtccaccatgtcccgtttgcgattccatagcccggcagacggttcgggtcgcctttacggcggcgatcttcaatctcgatactcatacagatttatcccccgtgtaatcagccactaccttcccgttgttgtcgaaatacttgatctgatacatcgggtggcaattgtgtttgtgcttcccatatttcagctggttggcaaataccacatccagattcgcgctgccgttcaccccggcgatggtaccgatatcgccctgcacctcaaccatcatccccagcttggcaaacgtgatcccacgagtgcgggccatgccttcttcgaactgcttcgccttattcaccatcatcctgctcctttgctggttcgcgcagggcacgggcgtaatgctccgcgcgggcgcagatgttgttcatgctgctgcgctctttgtcgagccagtcagccttgaatgccgccttttctccatcaggcaggacgctcagggctttctcatatgcccggcgctcagccatgctaccgatcaggaatgactcgaatacctcagccagcgcctctttgtcgcactgttcaaaggattctccgaccgttttaccgaaggtattctggaaaaactcctcggtgccgccaaacaggaacagcgggactttgcgcggctcagtctcggcatcgagctcagtcgcgccatattgaccgcccatgatgcccacggcgatagccgcaagctcatgcgtcggcgctttaaaggtgattttgtctgacgggttgatcagctcccagaggatcatgatgctgactcctcttttggtttgccttcgaatttcttgccgcagaatgggcaataattcatcgtcataaacgaactgccatcagtgcagcgctgggccagcgagccatctttcttgcgcttgagaaagcggaaggtgtaaggcacggtgacgctggagtggtcgccctcagccaggacaaacacgctgtttgtccagttggcttcttcgatctctccaatttgatcgccaaagcgcttggtcaggtgctctttgaactgagctcccagctttttgaaacaatcacaggccatcaggaatccttttagggttggttaaataacccgtaacgcaccgcgctacggggctttattgcttgatgcgtggttgatgatacgttatgcgtgacgtaatgcaagtattatttacgccactgctgacgcatggagtaaaaaaggccccgtagggccttcgcttatttactgtaaacggggctcagaccatgatctgagtgcccgtgtcctgctcccccggtcggggcattccataccggggctttcactttggggcagtggtaggcttcggctcgaccgacgctggtttgcctggctgattgcggatcgtggtagccagcgctcccggtcgcgtcgcaaagtaggtgtaacgccatttcccggtctgggtctcccagtatttcacgcgccagcctgaatcctgatcttcccacgcctcagagtaatacgcgggcttagaatcgttatcagcattgcgctgcgcgatagctgcggcctctccggtcggcttccagccgtgcaggttgatctcctcacctccacggttctggatatggcgctggtattcagcgcgaagggtgtcctcaattctcgccagctcagcggttgccttacggcctgctgccgtacagtagaagtgtgtcagctgctcgaagcggtcaaagccgttggtcatgttcaggaacactttggccttgcggtcatacatcagctggaggtgtggctccatccatccctgcgtcgggcgctctttcatgtgaatgtgatactcagccgtttctgtccggtcgtgcgggatcacatccagacggtacagatagccatgacgccagcagcgcttgtctgtacgcagggtgccatcgctcagctcctcctccgcgagctccagacgtttctcgctgcccggcttcacatcggacaggcccagcgaaacacggcggtggacttccgcgatcatgcgctgcgtcgtgtaatggggttgcagggtgatgaccagaccgctgattttggcacgcagcggggccagcgggtgcaagcgcttcaccacgtcctcaatggtttcatcgcgctgctgcaaatgcagctgcccggactccagcggctcgtaatcatcaggggcggcgtgatccagtgtcagcgcatcgacggtcttaccctgcaccatacgcataccacggcccagctgcggggcatgtactacctgactaacagcctctttctgctgctcggtcagctcaggctcctctaccgcgcgggccatcagcttttgcaggtctggggttgggttggctggcgcttccagcacttcctgaggcacgactggacgcgtgccacggcctgctaattgtacccaaggctcaccgccagaagggaatcggtcattcagattgagcacgtactcagcgtgggcgaaggcatcagccagagtcatcaccggatcgatgtgaatggtcttgccgtcataaatcaggtcaatgggttggtttgcagcgacggcacggcctacggcgttcaggagcgcttcaccttctgcggcgtggagttgaggcacttcttgctgctgggcttttaccatttccagacaggacataaacgactcagcttttgcctcagtaaacttctcattgtgcagggcgttaaatacagcaacagcgcgggcaataacggataatttcgacattaaagcatcctttgttcaattaattttcttgaaacagcttgttgatttccagcattgcggtacggataaaatcgcaatgcgctttatttcttaccagactgacgttattttgacgctctaactttttggctacctccatcactaatttcaggctttcaacgtttgcgttaatctcgcattcacgttctgcggtgatctctgcccacttctggcctaccgggcgaacatgacggcgctcataacggtttccgccctcatactccccgttatgtttgtaaaacttcacgccagccacgacgaacgtgtttttatagacacgatcaacgtttattttgcggtacacgttgaatgtgtgtgagccgggaacatccacgcgctcagtaattaaaacaacatcacctttcttaacattctcgaacataaaaaaagtcctccgcttgtggggaggactttagcgcgttatcttttttgacgcaagaattatttacggcatacgtgacgcatcaaaaggcatcgtcatcttcatcaggatccggcaggtgccgatcctcggtctcctccgggaattcctctccggtgtagaagtggacggccttacgcccggtcaggttctgccagcgacgaatcgccacatcagcaaagcccagatcgagctccatcacgcgtgcgcatacgcccattcgctcggcggccaccagtgaagtaccagagccggagaagggatccaccatgatgtcattcaggcgcacggtgttcttcatcatgcgctcccacagctccacgggcttctgcgtcgggtgcaggtcgctgcggtcaggacgcggcacgctgaccacgctgcccagcattgactccaccttggcgtcgccttccacccgcatgatgagatcgccgtactggaaataccagttaccctcggcatcctgtttgaatgggcttgagtcgccaaactccgcgacggtcgtttgcttcctgccaccgtgccagcggtgcttggcacccttgcgccagccgtacaggattggttcatggatgctttggaagtcagccatgcccagtgtcatgctgttcttcttccagatgacattctgggagaagtggaaaccgaccttttcaaacgcccagcgcaggccatgggccatcttgtcggagtggctgatataggtcacgccgcccggctgcatcgcgtcataggcgcagctcaggacattgacgaggaactgattaaagtcctcctcgtttttccagtcgttagcgatcccgccagtgcgcgagcgctcgcctccgatggccttatccatgcgcttattcttcttgcccacatcgacgttatacgggggatcggtcagcatcatgttggccttctcgccctgcatcagcgccagccagctttccggctgctcagcatcgccaacatacaggcgatgagcgcccagcacccacaagtcgcccggacggctctttggctcgtcaggaagcggtggcgcatcatcgggatcgctgtcacctcctcctccctccatcggcggcagcttcatgatctcgtccagctgctcagggtcgaagccgataacatccagatcgtagtccagatcagccagggcattcatttcgatgcgcagcatgtccatgttccactcggacgcccggcccagctggttatccgcgatgatgtacgcgcggcgcttagcctcatcccagccagtgcagtccagcgtcggcaccatgccaatagggatcggtgtgccatccgggaaagcaatttgcttgccctcgctgtacagcttcatcgctgccagctggcgtccatggcctgccacaatcccttgctcatcgacgaggatggcgttagtccacccgaattcaagcattgacgcggcgaccttctggacgtgcgccgggctatggtcgtttgagttgttcacgtaggggatgaggctatcaaccgggcgcagccggatcatcggggggatcacgtccagccccaacatcttgttaaaatctttatcagccacgttcgatcaccactctaatgttggtttcattgccattgcccttatccagcccccacgccttacgctccccgttctgggtattggtcagcgtttcggaggtgattttggcgagtttagccagatcaaagtttttgtctttgatggcctgataggcgagggtgcgcgggtagtcccattccttctggtgcttctccagcaggttggcgcgagccagcgcagcgaactcggcggtaatctcatccgccagcgcgttgagctcgtcctcagtgactacgcccagtttggcccggcgcttcttgaactcctccagcgcctctttgctcatcccgctcaggttgggatcctgcttgcaccagccctccacgcggactttgccagaaatggtgtcaggcgctacgttaaattccttggcgagaagcgacggcgtggcttccgggtcactctcgtaacggatccgcagtgccgtccatgcctctgccgacagcttgacgcgaggcttacgccccgtggcttttgtcttgcgtggcgtcaccatgatttcctcctttagcgccgtccttggcgcgggtgttaatgactggtttcctgacgtttcttttcctctgcggtgcagaggtcaagcagcgtctgcgagtgggcagcgaaagactgcgccagcgttgagaggctgtttctcaggttgtgcatgttgcgatcatcggcctgcacggctacatgcgtcagatgagcagcggtgtttgcactgtcctttgccagctccagcaggcttgggatcggtgtgaacatcgaacaattcagcatcgaggtttcggacatttggggtctccttgcggacgaataactggtggaatcgtgcgggctgcaacaggagtgtgccgcctcgcggtgcggtaacgaggtattgcccggcctgcgggcgcatcagggtggcccactcaggattcactaccagcggcgcgatatcctcatggaacacgatgaccatgcctgcggtcgggtgcaatttcatatcccggatgcggtgcgctgtcaccatgggcagctggtacggcacgcgggggcgataatggctcaggccaaacgggctattcttctgcatgacttcctacccatccaaacggggttttcacatagccagccgcaatcatggaggcgtctgacagctctttgaggcgggcgtacagctccggcgctttcccatccgcgtttcgctttccgcgctcgtacagcaggcagagatcttcccactcatccagataaggcgcgatgcgcgggcagttggctttcatctgcgggaagtaaccgcgcagctcaggcacggctttgatgaggcgatagcagcgaccgaagtcactggcatcatgcgggatgtcgccacctttcagcgggcgcagggcggctttcagcatggttttcgatgatgccccggtgtcgctgctcagcgaccactccagcattttaaacatcatatcgacgggcatggtcatgcgccgggccctccagcaacgtgacgcgccgggccatcctcaggccatccgccatcaacgggcgctggaatggctttcgggtattgtacggtgtcattgtcatcgcgcaggcaggagatcgcccggttgttcgctgtccagcaggttacgcccagctcgctgtcatggattctggtaatgacactggagagcacctttacgtttgcgcgggtactatcctcggcagggttctgatcgtagcaggaggcgaccagaaacggcaccagcgcggcgatcagcagtttggccttcatcattgggttgtccttgttaaaaagcgctcagagagcgtctgagcgcgttatggttgattctattcttttttgcgactactcgccagagctagggcagacgtgaaccgaatcactggcgtagcacagcaggcatttcgggcagtgcatcacatgggatgtcttatggctaaccaatggcaccgcgcaggtgtgaggtgtccctgcttggtaaacagctccacagtgcttgcagctttctgtgtgaactgatccctgccagtgttgcaggttgttgtttgggttccacgggctctttggatccttccagtcgaatggcgtaacgaactcgccggggcgcagctcaacagcgtttttcggtgcctgatttccccagctatcccatcccggataagcgtcgcgcgcgaacagctcaatgcgcggcacatcgccgtatagctcctcgatgcggtggaaaatctctttcggcttctgggagtgctcgcccagacaggagaagatgatctggcgcacgccgttactgacgcgctccagacctttcccgcgcacggcgatcaggcagtcctcggagttggcccggctgtagttgccaccgttgatttttacctcggaattcaggaagtccagcatgtcctcccagtcgaagaattccgacttgtccagcttgcggttgaagcgctccccagcgttcttgttgaacttcacccacgtaaagcccttcatggtgcgcacatcgaagccccacgcctcagccagcgcgatagcctcctgcgcgtgggtggaggtgtaccacataatcagcacagcatcgtcatcagccagcgaccagaccgggaggcgcttgatgtcctctttcttcatggtcaggtagtggttttcagcggcaccgttgctgattgtgttgtcgtagtgccatggcggatcagccaggataactttgtacttagccatgaggcttctcctgattggtggcgtccagcgcgatttccagcgctgccattgtttcttgcttggtcatatccccacgcttcccggtgaagacggcaagcacgttatgcgcagcctcgcgcaggttatcgacgtatgtcaccagcgagcccccctcagggatgccgcactcctcgaccagctgataataaatatcaccagcggcgcggtaagctgtttgcccggtgcccggattaatcagcagctcctcacgcagagcatcgcgctcgcggttggttctgcccagcacggcgatcaggcgggccagctctttatccttctcggacagcttcacttcctgctgttccagcagcgtggtcagctcagcgttggcgtcgcgctggctgtccacttcgccggggctcattctgcccagctgggagagcaggccagcgacctcgccacgggtgagcaccaaacagttaacattggcgttatgcagtcgcaccagtgatttgaactgctggagcagggttttgtaatcgcctgctggttcagggttaaattcgacgatagccatggttaatccttgaaaaaagttacccagtgggtgttggcccggatgccggacggatgaccaaaggcgggcttcatttccgccagtttaagcagctcgcgggttggcacatgcagctcattccacttgaagatcagcgtgccgtgtggcttgagcacgcgccatgcctcagcgaatccggcgcggatgtcctcgcgccatgtctttttgttcaggatgccgtacttcttgccctgccagccattagggccgcacttgagcagatgaggcgggtcgaacacgatgaggctaaacgtggcgtcggcaaacggcagcgcccggaagtcagccacgatgtcgggatggattttcagctcccggtcatcgcataagatatgctcctcgtccctgatatccatgaagacgacgcgaggatcctcccggtcgaaccaaaacatgcgcgaaccgcagcacatgtcgagaatgggtttgttagtggtcatgcggccttctttttggttttgtggtacacggcccagctcagggcgttcagcttatccatccctttgcggtcatacatgaagatggtcggtacgccgcgctcagtcaggcgtccatcctcgttgcgcgggttggcgtgctcctctttgacctgccgctccagctcggcaaggtcatcgaaagagtgctgggccagcaagtgcgctttccagccgtaattacgaattttcgccatcttccggctccacgtacttgaatacgcgatagcgaagcatattcacgccatcagcttggaagcggctggactgagagcccagatatggatccacgtaccagcccggttcctgacagttgtccagcagccattgctccagctgctcacggttcagatagccatccggctcagcaacgcgacgatcctcgcatacgcgatgcttcccaacgtgggccagcccgcgaacggtaaaggtgcagtcgatacgggcctgcccgctaatcgcgcgggtgaagtcttccagcgacagctccacttctaaaaactgccctttgctcgcatcatcaatcatcgtgatggtcatgcactctttgccgtcgccgcgcgaagggcgtcccatggtaattttgcctttatgcttcacgttctctctcctcatgcgctacgccggaatcgcgcagcagctcggtcgcatcatcgacagtggtcacgatcacccatgaatcggggttcatcatgtcttccatcgtgcgcccgttggttgccagcttgcgggccagcttcttctccatctggtgattctcgtcctcgatcaccttgatgaaagactcagggaaaaagctggtcgccatctgctccagcgtcttgcgcaggcgcggggattcaacagagcgcaggcggtagcgggcgcagccattcagcgcttggcgcacgctgcgcttgtcatacttggcggcggcacggcacaggttgaggatgtccagcgtgtccgggaactcagcatactggctgaggcggatcatctgctggacggggctcagtttcatgggtcggttatccttgcgttggttattcttcgagtacagcagccagcttcttcctggcatctttgagttgttgcgcatacatccagtcagtgcccccgtactcgcggcgaatggtgatatctacagtccgcccatcgtcgaggcggcggcgcaggtaatacccgccatacgggaaatgctcatcggctggaatgggcatattggtgattttcttagccatagcgggcctctctctctttggtggcaaagtgcagtttcattacacgttcgtgtaactccattctggcatcacggcctcgctttttctcgatggcatcaagcagcgcgtaacggtctgccttgctaggcaggttcagcacgtaccgggcttcacattccagtaaccactcgcgggaatcgcttggcacctgccgaccgtccaccagctccaccagtggggccttccagctgcacgcgtttctcgtttccatggctcgctccttacgtcattgacgccgttgataatacatcatttatgatgcgacgcaaacaaaaaaggcccgcgttagcgagccttatcaagatctggaagttatcggatggtgtggaatgttgcgccagattcattcatcacaaaaacttcatcacccggatagagcagctgatacatcgtgccggacagccacttattgtcagcgtgatgcgggcggtcagggctttcggtgttagaaagcaagatcccgatacaattggcgaggcactggaacggacggcgtgcggtgtaatgctcctcagggcaatcaggctgtgtacactcggcgtctttccaagtctggcagaaatattccaggtaatcgtaagccgggcaatcagtccatttttcagctggtggcatgaatcttgtgcctgtcacggcttcctcgtttttgtctgcggcttcgcggttgtagcattcaagaagcatttccatgcactgctcgaactgcgcagagtctggcaaggcaatgccgatgatatcagtagggaagctgataaagttttggatcttggtcttgtaaatcatggtaagtctcctgagtcgtatcgaagtcgattaaagccgcatcgctgcggcatcaggagaatactgtcacgacgcggacttaatcagccccactttggaatcagcgccgatcatcagatcgtgactaccgcagagaatgcggtcgtggttcacaatcccgatagcccggcaaagcagctggcgtctacgggcccgattgatgcgcttagggaagttcaggggaatgacgcttatttgcccatcgtagaatgctgcttcggcctcctcgtccagcagtgcgatatgagcggtaattactctcagcaggttcatttcggtctccttgctaaccagagaagctcagccgccagacacagaatgtcagccgtagactcaggcatcttgaggcagggctgcattggcaccttgcgcgtccagatgtcatggggctgcgtagcccagcgctgaatggagttaaacgggacgccagtcatttcgctgatagcctcaacgtcatgcccggcctgaaacagcttgcggcagatagcgatgaccgcagacgggtactggtcatgccggacggcacgccctccggtcagctccgcgatccgcttgtagagtggggtgcggcgtttcattcgcctgcacctttgacaacctcgcgcaacagcgggacaagcgtcttgagaccgccctgctcgacaatctttttcagatggtcgttatcgagcccctcgcagattttaagggccagatactgccgctcagcgatgaatgtcaccacttcttcggtaacaggttggtctgggccacctttaagcaccatgggttgattccttgcgtaatagccggacgtaatagaccagccatgatttcggggtgatggtgccgggcaacatagccggaagttgggccacatgcttatccagcacctcagtgattatggcgtcccgcgaagcggcgggatcagcctcaatgcgttgcagcatttcagcccggcataaccgggcgcgttgccgcagcgcatttttcagctcctgcggcagtgccattagccagccgcggcctgctcgtcaccattaagcgggtgcccagcatcaggctcagcggtcgcgccagctcctaccagctcgttttccggcccagccacttccggctttggggtggcaacatctgccgggttagcctgccagcgacgatagagatccatcgctttggcctgctcctcagcacggcgctggaaattctcaccaaactcacgcggatagaaccagacatcatcgatcaggttgccgatgcccagaatctgattgccctgaatggcgatacggcacgcctgaccattcagggcttcccacgtagccactccaacggtgctcagcacgcgaccgatgtacgcgataccgaaagcggtctgctggtcttcctgctccattgactgaggatcgacgtgcaggatgtagccgccaaagttaacgcccagatgctgcgctttcagctggattgaggaattgatggttgcgccatcccatcccagctgggtgttagcaatacgcgcattgagcacctcaaccgggcgctgttcagtggtttgttccatggtgaatccttatcgggtttgttttgaatggtcgagctcggcgagtgcctgctccatgttgtttacgactgtcacgaaacgcgggttagcgcttggatcgcgagcaaggtctgcggtgtgtttcagcagagcgcgggcagcattcaccgtcttggtgatagctggcagcgtgccgatagacagcatctgcatgaagtagaactcccccggcatgatggttgacagcatttcgccgctacctgccggatccctgcggccttcctccttgcgctggtaattgcgaagggtatggcccagcaggtcagccattgcctgctgcgtcatgcctgcggcaatgcgggcctcacgtacttctgccccggtgattttaatcattggtgtttcctgcttagttcaaaggtacggcaagtgtaacacgtcattattgacgtaagccagcattctgataactggcatatctggcgtcggtcgccatttcatccagcatcgccctcaggccgctgacgccgtggcgcatgatcccgaagtgcagggcggcgtgcagaaacgcatcggcgttgttgtccccctgcttgttgatgcgcgggatgatggttttgctggtggctaatccggtatcaaccgggatgatgacctgacctgccagctgaggggcacgctcgccgggaagcatatcgcgcagccagcgcttacacatgatggactgctccagtgctttctcagccgtgcggtgctcgctgacggtggcggcgtggcacagtgccccgttaaccatgccggacaggatgacgcgacggcctttggtcgccacaatcagatccgcgtagccttcggccttggcctgcttcacgcacgcggcgaggtgatgtttgcttggtgcgctcttagccatttgctttcttccctttcatcaggatggtagcggcctgaaaagcagaggtgcagtctttgactggctccagatatgcgtcggctttagcctggtcatattcatcaaacaccttatcgcgcagcgcggtgccttcatcggtatcagggaagcagatgcccagatccatttcggcctcctcaaactggaggataagcgacagcttaggctggtctgactggtcatcaacggacttcttaacgagcagctggcgaccgtgcgcctcgaatacttttgcaaaacgttccatgggatgatccttgcgttagatggaataaaggccccgatagtggggccttttgattgtagcgcgattctttacgtcttaccagccgtaagacacgccagcgccgatcacaaagttatgctgggtgtcgttggacacggacgccttcacaacggtgttctgagaggcgcgggcagagaagcccacagccagcgcagactcaccatcagtgttaccagcaccagcgccgatagcaaaggtctggtgctccagtacctgcgggatgttagccatggcggcgacgcctgcgataccagccgacgcacgtttgcggttgtcatcgatctgtttgttcaggtcggcaaacttgctattggtctgcgattccagcccctgaatgcgctgctcatggttggcaatatcggcggtgttctgggctacgcgcttattggtcgcatccagagcctgacggttcgcctcagagtgggcatatgccgaatcagcgcgagactgcgcatacgcgccagtgtcctgcgcctgcttcacgccagcgctcagcgtggtgaactggcttgagcgggtggaggtctcagccgccagagcagcatcctgacgcttctgatcatcgctaaacacgctggtggtcacacggtcgttaacctgagcctgcaaatcagcatcagcggctttgcggtcgttggtttcgttggtgatagccacgccgttattcaccacgccagccagtgccgcatcggatttggtgttgctttcggtgatcgcggtgtcttgacgggcctgatccgctacaaagtcagtcgcattgactttggtcgccagaccagcatccagctccggcttggtggcaaaggttccagccttagtttgcaggtcgatgatggcagagccattggtggctacgcctgccagtgcggcatccgctttatcactattcgtggagatcagcgcatcctgatcgttgtcgcggactgcctgcgcagccttatcggcatcatacgcggtctggtcaaccttatcagccaggccattcagtgccgcctgcgcatcggtcttggcagagccagccatatccagcgcggagctcgcttcctgctgcgcggcatccgctttctggtcaacggcgatcacacccagcttggtgctttgcaggtcggcatccacactggtgatgcggtcgcccagttgagtatcgcgggtctcagagtccagtttgttctgggtgatttggttctggtgatcgttgatcaggtcgctggttacatttgcgcgggcgtcctgaatgcggtcgtatgcagacggggacggcgcagcgattgcaacagaagcggtggaggtcagtgccagtgccagtgcgattttggtcagtttcatcatcattatctcgttaagtaccatttaaaggggttttgtgttggaacgaggctaactatacggcacaggtgacgcgtccgcaatagcgcaataataaatatttcgtattatttggctggaatgattcaggggactgattggaaaggatatttattttagcccccgtgggctgggggctaaatattagcgcgggatgaatggcttctgggtaaagacctcagcctgcgggaagtcaaaagagacatccggtgccattgcctgagaaggcagtgacttgatgtgctgggatccatcaggcaggaatacgccagcaaggtaacgcggcacctgaatgacgtttgcagccagtgcatagcccggtggtgctgcgggattaacggtatcgtcgattgtagccatgggtaaaagccctcgttgtgtctgagggctccagtatgccgtcactacctccggcgattaatctcatggtacagcgcagccatgaaaataccgatggcgacgggccagcacagcatgaccataaccagcgtctggggcggcatgttcttgccaccgatccccatcctgcctgagataaagtcaatcaggatgactgccgcaccgatcagcagtgcgacagcgccgtaaaattgcagcttctccagccagaagtcactcattggcccggctcctcataccagcaagatagcgcgatgtatgcagtgacaggccagagcgcagcctgcaccagcagatagcccagcgccttacgcttggggtgcatacgcggcacccatttgcgcaggcccagcagcagcaccactaaaaagccagcccagtacagggccagcgataagatgatttcagtctgcattgtgcaatgccttcccgatccgctcgatgcctttcagcgcctgctccagattgtcaaagcctgcggacttcaccatctggtcgatgcgctcaacggcgtctgtcatctggttgcccatgtccagcagcaggataaccagctcaggccggacgatatcgacaaattgccgcaccgcagcacgcccggctaacgtgtcctgccagtcgccgtggatggatgacagcacggtggccgccacgcgcatcttcacctcatgctccggcgtgatgtcggtcatcggcgcacggggttcagctttgtgaatcggtcgcgcggcttcgcgttgtccacgatgtccaaaaccttttgcgcggcccgcttgactggatccccgccctctccccgttctctgaattgttcgcaaagcagctcctccatgtgtttcataagcagatcacgctgggcttccagcaggtcgattttgtcttgttgtttttggtggcgctggtacgagtgccagttaccgccttggcgcatactcagctggatatcgcgcacctcatccggcgtcagcacagtcagcggctgagccggggtgaggatcatgcagttgttttcccagtcattgccgcgcatcagggcctgcgcggtgacgtgaggaatgacgccagcagtgctatcgcgcgggatgacagggatgatcaggcgctcagccgggttagggctgcgggcattgtccgccagtgcttcgagggctttggcggcggtaatcggttcaagcggtcgggccataccagtgctccatgtgttgctcatatgttttctcatcctcatcccagatcggggtgatggtgaggccattatcttttgcgtaggccagcgcctcatccttggcgtctcggctgaatacccgatccccaacagcaaggcgggaagccacgcgcgaaacaaaagcgtgctgcttccattcgcaggcgagctcagtgacatttttcagctcatccagcagggacttgatgcgctcggcgttccattcctcatcggtctggtcgtacagcttgcacgcgcccatgtagtcgccggggctgtttttcttgtgctcgatgatctccacggcgaggtcatacatgcgctgcttgtcagcctggctgattctgctcatcggcatagctccagtaagttacggtattcgagtcgatgctgcgatcctccagctggatgccgacgccagaaagcgcggtctctactgatttaccaacgcccagatatttatcggtctcgtcccatacgtgaacctgacgattctctaccgggcgcgttaccgggaacttggcgcggtgcagctggtgccgggtgtatttcggattgcctttgtcgatggtgacaaggttgccatgctggtttgtgacatacaggcccataggcaggaaaacgcgtttaaacaggtcgtgccatttaccttcggtaatggtcggacgcccgcctttgaggtgcgtcgggccgcaggcgctgcacagcttcatgccttcgcgctccggcgcatagctccagtcaaacgagctcggcgcgtggtagaacatgccgacgccataggcggtattatcaacgcagccgcagcgctcacattggaagatgctcacagtgatttctccagcttagccccctgacggcgctcccacttcccgcgtttcagtttggaaatagcggaacaggcttccagcgtgccgctgcgaaacggacagtctttgctatcacggaacttgttaaactcgcgctccatgatgcgacggcaggcttttccgcgtggctcgaagtccttcgcggtgtaacgctgatcggcgtcgatagggcatttgttggaacaaacagcctggataaagtagctcatcaccagctgcttgagatttgatgctttactcatcagtaagctcccagaatcaaaatcggtcgcagcttcgccagcacggcaaagccgataataaaataagccagcagccagcggacatcagcccagctgattgtatgccgcccggcgacgtgccagcggtgagcctgccagacaggcagcgccacaaagcagatgatcagcgccagcatgacgctttggcctgtcattccggcatctgcacagtgacgaggtgagtcacctctttcatgcactgcgagcagtagacggccttgccaccagacactcgatccccggtctcaccgctgtcataggtgccatcccagtcgaaaatatgggtgtacttgataacggacttaaccactacgccaaacttgcctccgcagtgcgggcagcgatcaggatttgccacggcgttcctcctccagaatttcctcaatgatgcgcccggctacccagttgctcagggtgctgcgcgacggcaggcgcttatagcggcctttgcgcccattgcgttgcccgcgctgagcattccagcggcgcagggttggcgcgttgattttgggcggcagcttgggctgctcgtcctgcttcatgaaggcgtgcaggtacagggcacagctggcttcgatgaagtcagtgggcagcacgttgagcccggtttcgttgttcagcaccttgcgcaccagctccggtggcatgttggcgatgcgtgccgccagctccgggcggtgctcattgagccacgcggtcaggattgcgcggctcatgctggtctgtccagtgtgtcgatgactttgctcatggcctgctccagcgaacggaacggaggaacatcaccgatccggtgctccggcaggctgataaaccagccatcgcaggcgttataaatcaggccgatcagcagctcaccgcgatagacctcaacgcgcagctcatccacgcgccggaacgtgcagcgcgggaaactcaccagcgcaggattgtgctgcggctcgacgaacagcggaatgttgcggccttggtcagcagtcgggaaaccgcgcagataaagcccggtcgcctgcatgttagtgatctcgcaggtctcggtgaaggcgataggctgcgatgcctcagacagctttttgcagcggtcgaacagctcagcccatgcgtcggacattggcacgccgtcctcttgcatcagtgcggcaagccgctcatgaatggcgatgcctttctctaaatcggtcatcgtgggaatccttgggtaacgtgccgggcggtgtgccaggccttgatgagacaatagctgattgtttacgtcatgtaaagcgtaattatgcgcggtacaaaacagcctggtatttcgtgaattctttgtgaccgggctcgcaacaatcgcagctggtgatctggtcggtgtacaggtgtccgcagccgtggcactcccagagctcggcagtcttggcattggtgccaccctcgcgcagccacagtggcaccgcgcagatccggctgtgaagctcgacagcctcctcacagcacacgttgtgcgccatcgcctcattgcgcatgtcttcctcggaaccaacgcagctctcggagtagtaaacctttccggtgtccacgaacatcaggccccacgtaaacggctcaggcttgtcagcagcagtgcagcgagccgcaagcgcctcggcttcctcggcaatgcgctcggcgttgagcaggtgctcggacttctcgcggggtttcagcagctcctcagcggcggtatttttcatttggcagtcctcagttggttgatgacctccagcacatcctccagcgcgatgtgggaagtggtgtacttctgcggcagcgccttgaggttggagatcaggcggttcacttccaccacgtccgactccggcgcgaggcggcacatcacctcaggcagcttgcagttgatcggctcgcctgcgaacagcggcaggacgtacagcccgccagtctcgttgcagtgcttcaccgcgtcttcttcgctccacaggagataggtctgatatccgtgaacatccacccagaagcgcgggcgcgggcgcagggcttcggcaatggcgcggatcaggcaaatggcgttgtcctcggtcgtgtcgcccatcaggttctggatggcttcgtgaacatcggcgcggtcgctgatccccttgtagtcctgccagctcaggccagtgttgatgggtggctgctgagtccggcgctcgattccatccagcgcgatacgcatcgcttggattgccgcttgcccgtctggcagcgtgccatagcgctcgaaacagtccaggtgatttcgcatgaattgcggcgtcagggttttgtaggcgtactccagcgggccagtgataccagcgggaagtggctcaggtgccttcttgggctgattgtaggcgtagtgcttgagcagcccgatggttgtggtggcagcgtgagcagggtgattaatcgcccccagagcagcgcccagcaatccacgcgggataacaatcgggtcgttgtcatcctccagagactgcacagcagaggcgatcaccttctcgtcagccgcagactcagggcgcgatgtcttccagccgtgatagtgcataaacgcggcataggccatcacatcgcgcgggtcgcctttgtcgatgtggtgcatcagcccggcgcggcaatcgtcctcccagtcgtggcgcatccagcctaccgggtcggccttgcgcttgttctgcgcggagagcagcttattgcccagcgcctgcgcagtatcgacgatcagatactgcgtcgagcgggccagcccatccggcagtttgacggtgaagtgctccatgccatccggccccatagcgggctcggctttgcggttggcatcgcgcagctggtcaatcagcacgcggataagtccgccgtagttcggggccagcttgagcatttcctcgtccagctcaaatcccggcccgctcaggctgtccccttcggcttcagcgctaattgctttctcgtacaggtcagccagttgttgttcggtgtaggtgctcattcggttcgatcctttgtcagtttgaggataatcagcccggtgtcagtcagcttgatgcggtagaacttcgttgcctcctgcccccggtcgatgttgaaagcaatcaggcccagacggaacagcaccgggatgcttggcgcgttgaatggcgtcgtggtgcggaaccattgcccacggcgcacgccgatatcagggcgattctcgatccccttcttgccatcaccgcgcaggctgtagctggtaccggacgcgatacggcgcagggtgtaaacctgcgccatggtcagcttaggggctttcatcagctgcgctcggtagcgatgaggtgagagcgcaccagcgcacggacagccgccagtacaggaacaggcgggcggttcagcttatcgctgcaaaggtcatcaatcgcgccgatgatagcccggtcggcgttgcgctcggtcagcagggtttgcagctgcttatcatgctggaattgcgcgacgctcaggcccttgatgtagtggtaaatggctgcgaccgcatcagagtaatgctcgctatcacgctccagctcaaagttatcagccattgcgatgatggcattgcgcgggccattgaattcagctttcaggtgctcagccagcacatcccacggcacattggcataaggctcggcgtctgtagccgggatctcgcgacctaccagctggcaggcgaggtcatgcaggatcatcgcaccgccgcgatagcgggtgatggtgttcacgtagtcccggacgccgatcagcagctcagggaatgacggcagcatgtcaggtgttgacggcgtaatcatgcagagcgccatcacttcgcgtttgaatgggtcaagtgtggtctgcgatgaccggacgctggtcaggtcattagccagcttggtgacgagggccggaagctctttcggctcagcggtcacgcccagcacgcgctgaatgtctttgaggtagcggtacgcctcgtcacggtcgccgcgagtggtagccagcgcctgatcagccttagcaagctggcctgcggtctctttgttggcttcgcgggactgtttcaggttctcgaacagctccgccgcgatggcaggcaggtcgccgtattcgtagtccgggtcaacctccagagcggtgcggatgtcgtggaggatggttttatagtcagccagatcgacggtcgcatttgccagcgcgttggtgcgctcggtcagcaggtcggcattctctttgaagttgcggacgtataccagcaggccgcttggtgcagcatgaggagcgccagtaatactgcgcagctcgttgatgattttggcgtgctcgctggcaatcttggcgctttcgtcagccttgaccttaaccgccatagcgacagccaccgggccgctgctggtcgggatcatgaattgctcgcgcagctggctgattgcttcgctgtgctcattcaggctgcgatccgcctggctgaatttgtcccacatctggtcatactcacccataaccttttccgcgatcagctcagggtcggaagacttgacgccgaacttgagcccgatggttttgagtgcgcggcgcagcgaatcgcaggtatcgcggaggtctttctcgcggtcggtcatttcagcaggcgctacggcttcgctgaatgtttgcagcttgagcgttgcccccttgataaacaggtcttcggtgtcgatgtgggcgctcatgttgagcagggcgcagacgcggcgtgcaatggtctcctcagcgggagcagcaccaccgttctcggtgatgaggaggatctgctcaatggtgtcgccaccgtaggctttgtgagggatgcgcattgtaatatcccaagtaccgccaatgtcacgggcttcgaacgttggcagcgccgggttaggcttgctgactgtagtcatgatgggctccttttgaatgagcccccacgatacagcgtcttatggtcattcgcaacgcatttttgcggcaataatgacgtaaatcacttcggtagctcggtggccacaatctcagccgggaagtcaggggaggggtgcggattcaccacgcagcggatccccatattgaccggggctgctgatttggcacggtttcggggcttgcccatgataccgcagcagcagagcacgctggcgtcgcgtccatatgccacagcgccgcagtgggtgcagcggtagttccggtctttgccctctccctcagagctcacgatacgcccaaaacacttcttgcagatgtggggctcaagcgcccacaggtctgaggtcttttttttatgttgcgagtctgtcattggctcgctgtttttgggtgatgcgcacattaaaacaattctccttgcactggaacgactccgtagccatctggtctgaccactcgaagcccaaaatatacctgccgcgtgttgtcccgtagtgccccgataatcagctcatcgactgacacagcgcgttgcttacgaaccgtcaccacgttccccccggtcatgaccgtaacggcatgaggcaccagaggtggatggttgaggggcttgcgaccacgggcattcttgccgatgacgcattccctctcacggttccagcagctaacgcagatgtcgtgcccgatgagcctgaggccagtacgttgacagcgtgaacagatggggattccgcacagtgaagactgagcaatatcaccctctccggcgtgatgggcaccgatggggcatgatttgcacagctgggagcattcaggagacttgttgttattggtttgagaccaaagggcggcacaggacgagacctgcaaggaggcgctgcgtctggtgcaatgaaacatcggtttaccgggtagttccggcactgtgaagtattcgattggctccatgagaaaaatctcacccgttcggcttagtcgagcagagtataacgcttttttgcggcgactccagtaaatcgctaaccgttccagcgttccggggctgcggaacggtctgcggaacggtttttaccccctaaaatggcaccacaaataataaataataataataatatcaatagattagtaagtagtagtagtaagtagtatatgtcaccgttccaccgttccgcactttgcggtgtcatatacatagcgcaaggaaatttcgattattatgtaatgtatctattactatcatattcattacactgtatgtctgtttctttattcctatatatctctcgcgccaaaatagcggaacggtggaacggtggcgcttttcttatgtttatcaaacagataaccgttccgctacccgttccgcagtgttccaccgttccacggaacggctgagaatggacaaaaaaaagccagctatgcgctggcttatttattacggtgtaattaattcattagaaatatccatcagcatcagggcggacggcaaggcggattttttcgagggcgtcggtagcgatgtgtaactgattaattacgtcatcacgaatctctttcaccttacccggctgcacatcatccatcatgctgaacatggcgaaagcgccgcgcacaaatttatcggtgtagcccttctcgtctttatccagcggaatggatttattgagcgccgtcacggtgcgctcgaagtcctcataaatatcagcgcgtggcgtttcaggtgccggaatggggcgggagctcgtcaccagtttgccgccaatgatctcggcgtcgccattaatccactggtgaacctgcggggcgtggacgcccatagcggtggcgaaagcggttttattgcccgcgtaatacagctcaatataggtgactaatttcatcactatttcctcagaataaacgcccggaacacgggccaaaacagaatgtcgtacatcagccagaacaccagcagagcgcaggccagataccagagatcgcggttgccagccgcgtcataaatcatgtagccggggaaggcgagcaggcagaaacaaatcagcacgctcagcagctcacaggcgcggttgattgccttaatcaccgtatcgccccccgttatacgttgcgcctttcggcaggacggtgcagggctcggtcttgtaactctgcgtgctgcggtcgtaatgcggaatgctggcggtcagcttggcgcactcgcgctcggcgtcggcgggatccgtgaacactgccagcagggtatcgcaggcatcatcgttgccgtagtccgtgtggaaatacagcgcggtggccggaatgacttctgccatgattgccgggcgtgcagccgccagaaggcgcaggcaatcggggcaggtcacttcaccttcttccacctcatgcttggcgcggaatgacttccagccgcacagggtcacagtggtgcccattccctcggtgtagaggtgattgaggtcgttggtcatctggatgactttcatgatttcattcccacgattttgacttgcgctctacttcatcaaacagggcgttagcctctgcttccttacgggctttcgccattttaagctggtcattcagcccggcagacgcgccataacaccagccggagataatggcgcacaccacgccagcgaacggggccagcggataatcttcgccacccagaccacgcgcagagagccacattgaggccagcataagcacggcaaacagagcagtcacaaagcgcaggcagttacgaacttcacgaattctttccacgttattctcctttataaaactcgttaatcacatcaattttgcagtgctgctctacctcgcgcagctgctgcttgtagcgtgcaggcatcccgtctttcatgcggtgccatttcagatcggtgaggaggctataccactgcccgccacactcgacgaattgcccggcatcgcacgcatagcgggtgccttcgatcaggtaatactgcggcgttttctcgcctttcgccgggtcgcccagcttggtggcccgtgcaggcgatttgccgtagcctaccgccgcaatgcagcgtcgggtcaggtgctcagcggcaggataccagtacccgtcatcgtgcagtttcagcgggtgcgcctgcgggtcatccgggatcaggaaggcatcaccgtgatagttgtacatcgtgccgaaaacggcaggcttggtcggctcacggtcggcaatgaagcgcttaaccttgaagccttccatcacgtcaggcgtaacaccgtggcgtgcgcagatgtcagccagtgcggcctcagcctcagcgcggaatgattcaaacgcggcatccggcaggcgtaccattgtccagtcgatagcctcagcagccgggccagtgagcatggtgtatttggacataattaaaatcctcctggtgcattagcaacgcgtttcagatggtcgcggtattgcgctttggtttcggtcatcagctcagccggaaccttacggatcagggtgaattgctcgcctgcgaggttgtagcagatgaagccgatcccgtgggagccgtcgccaaactggcgaccggacacgcgaacattgatagtcccagagcctttcccattggtggcttgcgccaccgcttttttgaggatatcagcgaaggctttcgcctccgcacctgataaagttttcattagcgatccccttcgtgggttgcatcttcaatttcacggaggcttttgccttccgccatcgctttggcctgccagtagtcgaggcaccccatacgcgcttccatttcgtcctggtgcgcctgatccatccagcctgcattctccagatgacgctcatatgccgcgtccgggtcgccgtggtcagcgaactgctcatacaggtggtcttcggtctctttcttccactcggtaaaagaggccagcgcggcgttgagcattaccggagagttggagaagaacagcgcctttttctcggtgcgctcagcgctgccagtcagggcccagcgaagtacaaccactttgccttcaccgccgatttcgacgctcaggttatgagccggggaaaccatgatcagctcggttaacagcagctcaaattcggccttggtcatgcgcggtgcagtgcgttttatgttggtcatttcgtttatctcgttaccttgggttggtgagataaatatacgtcatgggtgacgggtgcgcaaggagaaaattacacaataacgaaaatattattgtttgtttggccccatggttaggggccggagagattagttacagcggacggtgccaaacgaatcgcgtcggcaggtgctgccatcgcttccccgcgtcgtgccgaagctgtcagtgcgccagctgtttccgtggttgtcacgggtggtgccgaagctgtccgtgcggtacacggagccatcgctgccgcgcgtggtgccaaacgaatcggtgcgccagctattgccatggttatcgcgcgttgtcccaaaggaatccgtgcggtaggtggtgccgtcatcacagcgcgtggtgccgaaggagtcagagcggcaggtcagcgcggaggcgttaaagctggcggcgagcgccagcaggaggatcagttttttcatgcttcgtttacctttgctacgtaaatttcgtaccgttccgggtcaagcccgttaacgaccttcatggcgagatcatggcgactgctccagccgatagcgttccagctgttacgcttctgcaccgtttccagatgtgtcgcgtattcatcctggtattgctcagctgtcatggcgcagatgcgctctatttcggcgttgcccaagctgttttgctgctcaggatgcgccttgcagtgcttagcccacgcgtaattcgatttagcggccttcacgtactggtcgcggacgatctcccagtgcttagccttgccgcgaaccacgacaacaaatttatagtcgcggtgagtggtgcgggtaacaagcagaccatcaggtgtggtcgcggtcagtttgcgtttagctggcataattaagcccccatagctctttcggaaacagcctagcggttaagctgggccataatatcgggttgatgaaatgattgtacgtcactagtgacgtaatgcaatacccggacataaaaaaagccccgattagtggggctttttactattctgctttcagatgttcaatctgccgtttcaacgcggcgatctcccagtccttttcctcaatcgcccggtttttatcggtcagggcctgacgacacatatcattcagtttcaggacatcctgccggacgccttcgattctggcgtcgcgctcggctaccttgcagcgttcgaggtgcaaagcctcgcaagttttgctgtgagcatcaatctcagctttataggccagcttagtggtctggtgatcttcctcagatttggtcagagccagccgcagacgcatcaattccagcgcgtcattaccgccgaaactaaacggatcctgataggtgcgctgcgtgcggcgatactcgcgctgctcaggctgagcctttgcgccgggcacgttgatagtgcgcaggtcgatcccggcctgattggcataagccacggcacgaccgaaagccgttgcggcttcctctttgttcgtggtgccgtaggccagtgccagcagcttttcaattttcgccctactcataaaaacttcctcaggttgtatcttgggttgttgcgccggattataatcaaaaaagaggagattggaagcatatgaaaaaacattattccgaaataaacccccatgaggaggactttctttatcgtcgcctcgctgctgtctgcccggtcacacagaacggcagaaacatggatatcgctctccagtgtgacggcgacacgcagagcgttaccagcgtcgcctatggttatggcccggtgattggaaaatgggacacgccagaactcagcgacggacgggtgaagattccgcgctcataatcaaaaaagaggttgcgccacgtatgccgtaaggctattattcagccatctactaagagggacggaatatgaaaaaggtactcatcgcggcgctgctggtttcagccagcgcggcagcaacagaaacacccgcaatgtcgtttatctgcccgatgagcgacggctctcagatggtgatgcgcgtctatggcaatgacaccattgacctctttgaggagggcaccgaaccgggcgaccgtaagatgctggttaaggtcagcgaaacgcctcaggatgtgatgctgcaagtgtttgaccgcagctctcaccagctggttggtaccgtcgcggttatcaatggcaaaacctccctgctggctaacgacgcggacggcgattgcaacattactcagcgccggggctcacaatgaaaactgtagcagccattgcgctgatcatgctctccggcgctgtgcaggccaaaagcaccgcaggcgagcagcattacccgaaggggatctaccattgcgttgatgaaaaagcgggtaactacctgctgcaaatcggccccggcaacgtggcggcgatggttgacgctgaggatattggcgagctcaggctggcgtacattaccgcccgcgacaagatcaataacttcacggctacaatgaacgttgaaggcgattacattggcaaagtcaccgtaacaccgacgaccgcgctgatttctttccctgataacaccgtggcgaagtgcgataataagcgcccggtaaacgctgaggagtacccggaatgagagtattggtaacgcacgatcaccctaacccggcatcagctgcgtcgcattgctggacgctggtaaacggtggatggcaggctcgcaccgtgcagcgcgacggtaaacatttcgttgaagtgggagcatgggttggctatgcaaaaaacgccccggcagcaggccgtggaaatagctgagcaggcatatgaggcgctgttagcctcccggcgcggtgaaactcatccacggttaataaattacatggagcgcagcattagcgagcgcctgcaacgtgcgcaggcatacgctgaggcgaaagctctcgaaccgcagcgcgaagctgttaaacctaccgccagcagtgagccgcttggcccggtcgatgaaacgatccaccatggccccggctggtctcgcaggagtgactaatgactgaaaaagtagctggaatgaccgctgaggagatcgtgcgtttcctcaaagagtccatcgagaaacgttgcggcgaactgccgtcatgttcggaagtggtctgggactgcgataacttcctgatcaattcgcatcaggttgttggcgatatctgcgagaagtttggcctgtactccaagccagacgaggactggaaagacgaataatggcaatgcgcgtcactgaaccaaacaccaacgggcgcggaggtaaacgcgctcagtataacaagctggaatcgcggcagcgtgccattgagaatggcgataacacttactggtcgccgtacccgtgcaagcgggctggtcatattggcctgcgtcgcaccagcagcggaaaatgtatcgaatgtgagcggatgcgcagcactgagcgcaagaagaagcgccacgatgatttcagagccagcatcaccccagcaccgcgcagccttggcgcttatgcccttatgcgcggtaccgacttaaccccgaacaccaaaaaaatggagccgcaatgtcagccaaagacgaaaaacaagtgattacccaaggggccgaaggccagatcaatccggtctccggtcagcgggttaaattattcgttgatggtcaggaggtgcagccgattgacgccgacagcctgagcgtcgaggtgcctgccaaagagaccaaaccgaccgatccgcagccgggcgagaccaaaagtaagcactttatccgcctgttccgtggcgcgttcttcgggccaaacgccatgcgtaaccactccggccttaaattgaagaaagggaagcgcaaatgagcgacaaatgcaaagtcatcggcaataaactgacgccgtgtaagcacctgcaatctgctatccagcccggaaaccccagctcgatttctcgcggtatttatattccttcacgggtgaatcttactaccggggagccgggaactgacattgtgcaaatccattccggcgatcattccgtgcgcggtgtagccgctaatttttgcccattctgcggcacggcgatcaatacatgggatgcgcctgaaagcgctgtaaaggtcaaccatgaaaattgaagacacccagacgcgcaccatcaagatctgggatctgccggaatacttcgacatcatcctggtgaatatcagcaacacttatcccggtgccgggcgtctgacgcttaccgccgacagcgacagctggagccactactggagtgctatgggtgaggatcgcccgctggagcaattcctgctggacaccaacgtggattacatcgtcatgaagctggggaacggcatcagcagcacgctggatgagcgcgacgatgagcagtgcgccaaagccatccagcgcgcgatcctcaaagctcgtcggcgtggagacatcacggcggcagaagcgcatcaggcttacttcgacatcgaaggttgcgagaatatttataaccgctgggtgtataccgatgatttttatgcctgcggtcgcgttgacgatgacgatatcaaatggcctgagccaccatctaacccggcatatgagcgtctggagtatgccgtcaccaaaatgcgcgaagcgcttacccagttgaaggagaaaaccgatgccactgccaccgtttaatgacacattccctcgcgtatcagttgaggtcagagaactgaatcagctgcgggccatcagggacgccgccatgcagctgctgcgctgcaaaggtcgctaccactccgaactcaattacaaagcgctggctgaggcgctgggcgttacctcaatccctgacgttagcccgtggcatgaccgaaataaaattcagccgctcctcccggaatcgcaggtggccggagataatatttttgagcacgttgcggtactgactcgctgggaaggtgatcagcatccttgcgtcggctactacatcggcaataaccaattccagcacgctgacggcacaatggaaggtcggatcggttggggcggtaaaaagtatcgctgcatcgaatggatggagttgccagtatgaccgcgcgtgcgtacatggggccaaagcgccgggatcagtttatcgatccgctgccgggcgcaatcatgaaggcacgccagatgaacatggacgatccgaaccacgcgcatttctgcgtcgtgcagtgtcatggggaggtgcaggtgctccggcatatcgacagcagctggcgagtgctttacagcacgcggcatgacgaggaaaagaagacgtttctccggcaaaagtaccattaaaaataaagccccttacggggctttttttatagcggtaaatcttcctgaatcgcgcctacatcgaggcattcatggattggaatggctacgcacgccttggcaccgtcgccgcgcactacgcgccgtttagtgcgctcagcgccggggattcgcatcagctggcccggcaagttggtagagaatgactgctcagcgatcatctttttaagctgaccgggcatactgacaagcaccagcacgcgcccgtcaaactcatcgtatttcatgcccagatagctcagcgccgtgatggcgtcattcatctggatgctgcccggaatatccagcttggcgttatgcttcccggcatagacgcgagccagcaggtcacgcacggaatactcaatcgtgttgtatttaacgagacttgagagcaggaaggatagcgcctgctgggcatcatcatcttctttctccggcagggaatccgaccagtcgaattgttccaggtatgccagagccacttcctcagacggcgcgacatcatgatccagcatgtagtcacccgccataagagtacccagctggtcagtgttacgctgcgagccaaaggctttcaggccgatgcgccggaacacgttcacagctttcaggatctcaggcatcagcatgacgctgcgtgatacccagcgatcagagaatgattcatcctcaagctggaggcgcatttcgtactcggtatcaagccagacttgctttgctgctgcgtcggttgggtcggaggcgttgagctccagcagggtaaagcggtcgctatcggctttcttgtcgatttgcgggttgatggagccgaacataaacatgctgctgattagatagctttgctcgtcacctgaggctgagcctttcgcagttttagcgcgggacaggctggacgcctgccgggccatcgtcatgaccgcagccatgctttccttgctcttacggtcgttactttccgcctcatccatccctactggctgcgacttattacgcagcgtctgacggatccccgcctctgacgagttaccctggaaatacagcatcgaatcgccaagaatcccggcgtaatggttgagcacggtggatttaccggagcctgctggccctgtgatccagatgtgcggacgccacgggaggatcccgcagataggcgcgaggaatgtccagccacaaagcaggttggcgaactgcggacgccgccagcgcaggcggttggcaatattccgcacttcccgcgcctgcacatccgttaaggccgtcataatcttcaccagtggcttggtgatggtgtagacgtaattgccggggatgaagcgcagcgggtgatcttttccgttgtaaatcgccccggtgccataatggaaaatcagcgcgtcaccatcacgccacgcgcccggcgctcgcaccttggcctcgtcgaacgggccaacgatgtgggagattttgatcaggtcgttttgcgcggtggcaatctcgaactgatctttagaattgaggtaatgatcatcccaccactcctttggagccagcatatagaggttgctggcctgcatctggttggttttcaggttcacgacttctttcatcgcgttgacgtagaagaagtaatggaggctgcggtgccccagaaaacggaaatgcgggttattggagtaaatagcccggtcaatgctggcattctggttcattttctcagtgtcgagagccttggcccatggggctggctcctctcctgaggcgtcggctggctcctcgtcttcatcgtcatccagagggcttggcagcactggcggaggaggattaagcacgatatcaaactgagcagctaccacgtccagaccttcacggcagtgcagatcgttgaagtcggtaggctcgccttccagtgacgcgaactgcgggaagatagcctgaccgcccagaatctcagcagcctctttcccctttttacgcccggcgttgttaggaacggatttaacaaaggtgaactggtcattgtcgccgccgatcaggaagcggggatttttcccagactttttcagcttctctttgagggccttggcgacgttgacaaggttcccggcatccagacagacgataacggcgtgcccggtcgcttcatggatagaggccccggtggcgtagccctcgcacaggatgaaaaccatgcggtcattgatggtcttcggcttgccgatcatgtgatagcggcccatcttcgcgccgcccggtaaaaatagcttgttggtcgcgtcctcaggcaccgatgaaggcggtacgatggcttgcagtgaccagatttttttcgggttgaacacatccaccagcggcatcagcagcgcggtatctgtcagctttttccaatatcctcggtcttctttctctaccggaggcacccagaccgaccacgggccaacgcggagcccgtaggctttaacctgcttggctttcagatagtcatggtctgctggcacatcttcactggcagcatcccagatattcgttgcgatgacggatttcttttcttccttctcggcacgctctttctggcgcaacgcatcacgcgcagcgcactcagctttaaacttagccttttcctcagccgacagcggggcaaagttgccttccatctgccatttaatgccttcgggagaagttttgcggtgatcgccaaagacaccagccgggcgatcatcgtaatagaatttgaaccatccgggctcgccatggttggcatcctcaggacggaagcgatcaggcggtgagcctgcgagagaaggtaaaatttcgccgtggtattcaataccagcatcgaacatagcagcgcgaaaggcttcggtagcgtctgctagtgttggtctttctgaatagttattagattcgttagccacgtctgttccttaacaaatatctaacatgagcccgctccgttgttttaaggatgccgggagaagggtaaaggaacggaaaccccgctacccggtagctaatcgggcagtctcccggcatttgtcatgacgacgcgtgctaatttaagccgcttcgctcagactgtctaatcatttttgcacttttttcttattgacgaaccactctttaacgactaactcagcctcctccgggctgttagcgaagcctgcgattcccccggctgcattcactcggtcaatggtttcctgctgctcctgagtgcgcttgccgccctctgatcgcttggcatcaaagacgctgtaaaccgcgattttgctccccaccatttccggcgtgatttctacagtgatatacccgttgaggtcaagcgtgcccgtaacggattcgcctgaggttgtggagaagcccagcgcgatgctgcgaggctgtttgattagcatcccctgcggcgtcttcgtgcagccgcgagggcccagcgaggagagccatgcacgcccggtgttgatgcggaagaagcgcccgccaagtttcgacagcttggcccagatctgtttttgcgtttcgttttctaatgccattggattgtcctcttgtaaaaaagcgccggggtcggcgctttggagttttatgctgtgaaggtcagattagaacgggatatcatcatcgaagtccatcggtggctcagagccttgtccgccttgttgctggttttgtggtggacgctgctgctggcgtggctgctgattgcccttaggctgctgaggctggccccagcccccttgttgctggcctccgccttggccttgtccgccctgctggcctttgctgttcgggcccttctcaccaaactggaaggtattagcaaggatctcggtcgtgtatttcttcacgccgtcctgctcccactcgcgcgtctggagttttccatgcactaagatctcatcgcctttgcgcatgtactcgccaactacctcagcggctttgttccataatacaacgcggtgccactcagttttttctttctgttcgcccgtgttcttgtcgcgccagcgctcggaagtcgccacgctcagggtacaggtggcagcgccgcctgcggtgtaacgtacctcaggatccgcacctaagcggccctgaacaataaccatgttaattgatgcgcccatttatcgttcctcgttagaaatattgcggctcgtcgccgttttgttgcggtttgaaataatccagcacgctggcaccatttttgatagctgaatagacaacgcgcatggcgctgatatcgtccatagtgaagttgccgaccgggatccccatgtgggcttccagctgctcctcgttgacgccaaaggctgcaaacgcggtaataaggcgctcgcagcggtctttgagcatctgctgctcctgctcgatctggagataaactttcttcatgcgggcttccagcatacggtgagcccactgcggcttatagccacgctcagcagccagcgccagcagctcgtcaagtgtttcagctcgcgcggtctctttgcgcttctgcgcggacacgcgacgggcttcctccttggcggcttccttctggcgcttcttcatcatttccggcgtcagctccagcatgttctcgtcggagtgatccagcttgagggcgaccgcacgctcaatctccgcgccgcagtccgggcagaccatatcgacgccggacgccgggttattgaggcggtggatgcgcccggcttctttgccctcgccgcgatagaagacatagaagcatttaccgcactgcaccagcgcactgctcgcggtgcttttcttctcggtaaagtccatatcgctgtccagcgaccattccctttccatttctgccgggccgtgctcgaagatcatcccggcatggtcgaggacgtagcagcattctttgcccggtgccgggcgcaggccgcgtccgataacctgcaaatagctggagagggacatggagaggcgcaggaggataatcacctcgatctccggcacatccacgccctcgatcaggatgccgacgaaagcgaccatcagcagctcgcgccgggccagtctgcctagcacgtcagcgcggcgctcgtcgtcatcctcaccgcagagcacttctgccggaatgcctgcccggctgaattcatccgctacgtgagtggcgtgcgcgatggtgacgcaccatgcgatccccggcttgccatagcacttcgcccggtactgcttaacggcgtcgccgttgagcgctggcgtgtccatggcctcctcaacctgctgctggttgtagtcgcccatcttcgtggtgaactgcgaggtattgacgcgggtctcaccgacgaaatagcgcggacgtaccaggaatccgcgacgaatcagctcaccaatagagataacctgaatcaggcgatcaaagtgcccgccatactcgcggcccagcggcttgttatccagacggcaaggggagccagtaacgcccagcactttggcgttaggccagtgggacagaattttatggtaggtcgctgccgccgacagatgcgattcgtcgataacgatgatgtcaggcgtgaaggggcattttttgaggcggcgagccagcgactgaatagacgccacctgcaccagatgatgatactgctcacggttcccagccatgataatgccgtggggaataccgaaagcggacattttagccgacgcctgcttaatcaacagatcgcggtgcgccagcaccagcacgcgtcggccttttaatgccgcgtttttggctatctcgcagaaaactacagtcttacctgcacctgtagccatgaccaaaagcacaccgcgaacctcgcggaaggcgacgcgtgtcgcgctgacagcatcgccctgataatcacgcagctcaaacgccatttctctctccgtgaacgtgtgcggaataaaggttgaaggggccgcacccgtaaattatttggctttcttttcttctcgctcttggcgcaggaattccccgcgctgttcgtcggtcatgctttccagcatatcccggcgctcctgctgagcggcttctacttttaccagctcgtcgataaagagatcaacgaccatgatggatttggggatgcgctcgaaccagcgatccggtgttgagcggctaacgccagctcgacggcagagctcagcaatagagataccgcaggcatcagcacgtttgcggatgtctttaatcctcaggtcgaagtcctcagaaaacgagcgttcgaactcaggcgctttaactgggggcttaatgccttttcgtggtgccattttacactccatttataaatcgcctcgatgttatctaatttgcagcgattacgccacaggattatcacttgcagcgtccaaaatttgcgtatagaatcgccgtcacaccccaaacgatggacgctaacatgaaaactatcggatattcagagcacccgttaggcttcgttgatattgataacgacgcctatcacgcagggccgggggtcagtaaatcacaccttgacctgattcgtcgtaagtcaccgaaacattactggcaccgttaccttaacccagagcgcgagcctgaggagaagaccgtacccatgatcgttgggcaggcaacgcactttgcgatcctccagcctgagctctttgagtctcgcgtggtcaaagggctggaacatgcccgccgttcaaacgcagagaagcaggcatggtctgagtttgaggccgctaacaaaggcaattacatcgtaagcgccgacatgtacgaccggatccgctatatccgcgacgccgtttggtcagagcctgagtgcgc

SEQ ID NO: 8 - DNA, 149818 bp, Escherichia coli phage ECML-183-2
  source 1..149818: mol_type = genomic DNA
tctcgtaaccttgtagaattcaaatggttttcacctgaatcattaggttggaagaaagtagacgatcctgaagaacaaaagaaaattgataaagaatgtcttgctaaagtcgaagaatggaagcataataaggaaaaagagacagggcaaatttgggctaacattcatgaatctcccaaaggtggatggtttacagcctatagtcgggcaggtgaacttgctgctttagctgttactaaggctggagaattttacaatcttaacgttcagcttactgccggatatgatgtgggtaattcctgggcatcctgtcattgatctaacatattgttttataaggggcttctgcccctttataggaggagatatgcattacgatttagattgtcttggtatgccttacctaccagatgcatttgaaggcgaagaagaacgtgaatgggacgatggggatatccgttgttggtcttgtggtaaagatatgtcctatgaacaacatatgcacaatgatggtttctgcatacattgttataatgaaattgatctggaggaagattaatgggaaatggtatcatgatttgctataaaattgtgcgtattgtcggagacgaagttaccactcggtattttatgatagaatctcaagccgatgaggtttacaatgactggcttgaaaaaggtggatacgattttgtatctaaagaaactttccgtttagaagtataaggagaaaacaatgcgtaaattagtgagctttaatgtttcaattcttgttgatgaacaaaatgaagatgttattaaaggtcttgcaaataagattgcaggtggaatgacggaagctgaagtgtgggaagaatgtgctcgactttatgaggaaggtgttattgaggtcttgggggatgagattaatatggacgatgttgtaaaagtaactgtggagcgtatcaatgactaaatcaaaacaaatcaatattgccaaagaaattcttaccgtattaaagatcgctgatcctaattctgtcttggctggcggtgctgttcgtgattggcgtattcttgatattgctggacgtgatctggatttctatacatcccttcctgcacatcggactgaagaacaagtacaaggattaattgcatctgctttaatgggaaccaatattcgtaaactaggaaacaaagaggcttctgacaattatgaaggtgttactggtcttaaacacgtttttgagtttgaacgtgatggtcagctttgcaaccttatgattatggaaccaagcgtaatgacaacctttctaaatgagtttgatctgtccatctgccaggctgcatttgatgggaaggattgttattactctaaagattttgaaacaactttggaaacagggatctgcttcttgcacaaagatgttagagaagatgccaaacacgttattaaaattgctacacgtttcccatatcttcgttttgtgaaagaggttaaggttccacgtccacctcaagtagataccagattggaagaagatgatattccttggtaattaaagcttgacaatattaaacattttatgataggatagcattcaatgactgaacgttctaagatagctgttgaaactgtttatggaaactacaccagtttgacactagttgagaaaaatgttgtaggtcttgacaactctttttattttcaaattttggttattcaaggtggaaacaagaagctaactgctcgtgtcgaaacatctgaaataattgaaaccactgttacaaacaaagaattcatttcactgcaagatacaatccgaaacgttatagacgaagaaggcaaagctgccacaattaaactcggaggtttcccagtgcaaatagttcattttcctaatggtgaaattggagttggaataggtaaaggtaaatacctgttagagcaagatgatatggaaagactccgctctttctgtgcaaaattaatgtaatgtagaggagataataatgtccgtaattaatactgaaactgatcgtaaaggcaaaaccgtaacttatgcaactggtatcgtagactacgttaaactggataaattcgctgaacctaaaacttttcattgggaaggaaaaacgattgtttcaactcaccgagcttctcttgttctgaaagagaaaggtgctaaaccagatgagaaaggtgtttggatttctcttggtgatattgaactgaaagaaggttatgaaaacctgcaagtcaaagaaggtgataattggatcactattgaaaaaggtgtagaagtaagtattgatattgatcgtgttgataataaaggcggtaaaacttactacaatactaaaaaatctcgtattacagtattgtctaccgatggtgttcagaagtctaacaaatcttctggcaataaaggttccaacgatgctgctcctaaacaatcctataaaaaacgtgatactgtaggtctggaaactggtcacgcagtaaatggtgcactggaactgattcgtaatggtgttaaaggcgatgctttcgatatcgctggggttgttcaatctgcaactgtcacgctgaaatctgaaattgctgaatctcgtggcgttgatattaatgattatgatcttggggcatctgttggtcacgctatcctcaatgcttgtaaagaccataccattaagactgtatctgtagaagatctgattgattctgctcgtaaagttctggctctgtctgataaagttgctgctgccattcgtggttccgcagaacaacctaagaaagaagagaagaaagaagttaaaaagcctgaaccacaaccagaaccaactccaagtaatcaagaagaacctccgatggacttcgatgatgatattccgttctgatcttattgatttataaagagttttttataaaagaaaggagccaaatggctccttttcttatttataaccggaaggaatgttgttataatcagaaagttttgtgcaatacctgaataggtaactattagctactccgcctaatgtatttgttaatgttgttcctgttcctgtaagatttgtgcatccactaaagaaagaagataatgctccacgtttaccacaaacagttaaccctgggttgtcattaaagatcttattaaaatctgtaagtcctaaacaaccttggaatgtagctgttaaagaggtcactttcgttggaatattatcaaacattcctgctggaacttctgcaagagaggtgcaatctttaaaggtgtaagaatatcttgtaacttttgataaatttttaaataaatcagaaggaatagatgttaaagacgtacaaccttcaaacgtgcttgacattgttgtcatcgaaggaaataaagtatcgctgaataatccttcagggatagctgtcaaacttgtgcagccagagaaaataccacttatagacgttccggtgtaagatgtgttactgaaacaatcagaggttattcgtcttaagttagcacaaccttttaagaattgtgaggctgggcttgtagaataactaatcctgttgccgccccataattctaaaagacttgggtttgcttccatagacacttccacactattaactactgaagcacttgcaaattcaatagccagtctatattctcctgcgggataactatccactgtagagaaagctttgtttctaaatattactttacttgaaggaactacaacgtcatccaccttaactacaaagttagctggtgtaacagtacccgataaagttgggaacgtaatcgccccatctgccgagtggttgaaatatccgtttagaaccgttaaactactactcggagatggagctaactcctttcccgcaacagcgttcaccgttaaataagaactatcagaagcggtaacaacaccttgatatgtagctgtgcaaccaattctacaaccaccatcaccaacaccagttattacaccagttgtaggatctactgtagcaacattaggatctgtagttgtatactcaacaaccataccaggtaagcttgctgctcctgttggcgttatttctgctaccattgtttgtgttgttcctacatccatcgcagataagctaggagtgtaaacacttaatgttgaagcatatcctccagaggtatctgataaagttgttccttcagcgtttaaggctgtcatacccgcatcaaaaccaccttctgcatggaaagtcattacaccagtagacgatattgtcatgtttgcaggggcagaagaagtgtatttaatattgaaaagtttacctccttctgggctaacagaatgtgtcaactgtttagttccacctacaatacaaattcctaaagaatctgtagttaagcctgttgccagaatatcgcccgtaatcacggagcttgctattggtgtgaatttattataatttagaccactattgaatagatacgaggctttcccatctttccaaataccggaataatacatatctccattataaacgaaaaaggttccttgataacctaattggttagtaatatccatattcagcgtatgaacgcttgtgagcttgtttatatcccaggaacccactccttcaggtttaactggttttcccacttggagtggatctccgctcgcagaatcataccccaaacctaagtttgcagtgtagttcttaccaatagcccacaaggaattattgatcccaacgaaaaaagagtggcggcttggtggaaatttccatgttgaaaaacctgctgcaaaggtgtccagtttagtgtaggttgtttctgtattagatctaacatataagtagtttactgtacccgcgccaccggaggtatctcctacaattattgtctgggaaactgtattgatgtaatctttgacatacactgtttcagtagtggatatcgtggcattgacaaaagcggttgttgtgttattattacctgctaaacctttactggctccacaaacacgcaaggttcccacattgttgacataagaacattgattgtagcctgcatcaaaagcaactgctgcacttgttatctgacgaggagtagaaacttcgttagtagtacttgcacctaaactacctactgtgttttgacctgatccataaagaacaccactattcattaaccagagagtattgttatatcctcccttaacctctttaagattagctaaagagatagtccctgttattacagatggaaagctggtccaagtagttacacatgcatccgtaccacctgctgctatagatcctaccaaccctgctgtcaatcctgaatattgccatcccccactgttagttttaataacaaaacaacgatctgcggtaaacacatccgctactacagtagaagctaagtggaaattattgaatcgtgcactacgagttccatctgcaatctcaccaaagaggtttgcgccttgagtaaacaatctaccatcattaagcaaaattgctaaactactgttagaattaccagcgttatctgggtaatctaaagtaattacttttttaacaatacctgctggcagaggaacgacaccagtgctggtcataatagtaaatattggaattggaaacatttaaaccctccataaaaagaaagcccctttcggggcttctgttatcgtgttacaacaaccatgtccacgatattacccacaccaggatacgttaattgcaaaattgttactgcgttagcagtagttgctatttctgtatcattcagtgctccataagacgcatctagtgtaaccgtgtgtcccgttgtatcttgaatcaaataaatcattgctgaaaatgctttaggttttgtagatccagtgacaccaggccatgctccaactgtcagagcgtcagttactgtaacaacatacatattggaagttccagaaggagtccaagatgctccagagttggcagtagttgtttcaagttccatgaaacctgctgtaactctagttggtgttatagcttctgtaggatctgatcctgatatttcgatccagttcccatcagaacgaccatacgtcaagccgtcttgaggtgcttctggtatactaggaagagttcctataagtgtccatgtagaagaatctgttttcttaaacactgctccagtggtagtattgaaagcgtaatcattgataacaccatcacctgcgactggattagttgttgctacaaaccactgtgcgccgtccttaccgttggttccatcagtaccgttggttccgtttgttccaggatcacccttatctcctttatcccctttttcacctttgtcgcctttaatacttcccatgtcaacaaaagatgctgaattggtgtcttgatcgtaggtatagatgtaaagattactagtgtcttcagttaagtaagcatcaccgtagttattataaacagggagagcttcgccgtttgcaacatgacctttagctgtaatagatctaccacccaaactacctacattgagccacgtttgattgtcgtcgatccacacgtaaaggtcattttttacaatgtaggcatcaccaacctccgctacagaaggtaattctgaaacatctgacaattcaccatttacagaaagacctgcaccaaccggaccttggataccttgaacaccctgttcaccttgtggaccaggatctcccttatctcctttgtcacccttctctccttttaaggaagcaacaaaatctacttctgtcccttcattaccagcatccagccaactttgatatgcagatttaccttcatctccatctgttccatcaagaccgtctttacctgcctcaccttgtggaccttgaggaccaacaatattacccatgttgacccaagctgtcccattagagacataaagattaccatcgatagagtacgcttggcttacgttttcagagttaggttgtggtaagttacttgtagaaggcaaatccccacgataatcaaaaccgttggcgttaacaccaggtgctccctgtggccctgtaggaccaacatcacctttatcaccttttatagaggtaagaaagtcataaacagatcctgtattaccatctgccaaccatacctcataagctgatttcccttctggcccaagagaagaaataagtttccaaacagaaccatcccaagcgtaaatcacatcacctacgatataaccatctcctgcaatgttacctgtagatggtagttcactagtgcttgctaatgatcccttaatattaagttgagcaccagtatctcctttcaaagaagcaagccactgggcttctgttccaacaaaaccattatcaagtgcgatctgataagccgatttaccagcttcaggtattgcttctgacaaatcatcgatctgttgttgcactgccgtaaacttggcattgataattgctatatcatcagcggtcccaacactttgccatgcaagggaagaaataccacctgtggtggctggcgtagagtttgctggaactactttaggaaaagttcctttccattggtaataattcccttctgctgctaacagcaaaacttcacgggaattacgtaatgtaaaacctgcctcaaagctgcgacgttttcgataagtagcttctaccagatcggctatcgcactattaggtcttgttaaattcatttatctctcctattattagaccattctattggaagaagagggggaatcccccctctctatttccattaggttgttggcacatctaccactggtgttgggcgaataaccgcagtattacctacagaaacattactagaatcgttaggtatggttttgattctaactccagcactcgtaggcgttacaatcggatctgcaatgtctattttaactgggttagtccacgtatcattatcttgataaggtgcacgagtaataactgtgtccaaatctgctccacctacaccagcaccaggaatacggatacgtgttcctgctgacagaggatagtgatacaaccaagaagcgtttgttgctgtcccattaggagtcaagttctgtgtcaggaaggtatctcctgcttgtgtagctcgaataccgaaagctgggatatctggaatgtatgccccacttgttgttacaaggaagaacgtattatccgctttgactatcatatcccctttgtcaaactccttccctgttgggaaatgcatcccatcaatgtttcggctagggttaggctctaagtaataaactttgctagttgtccctacaatagctccaataccacctgcgatattggtatacatattagcttcaacattacagttgacacgatgaatatccgagtaacggcaacggctccactgtggacgaccagtaaccatcgtcttgccatctgggtaacagtttacgttaaccatctcaagaacagatttttctctacggaagaatccatcataaaatgtccctggaccagattcaggttgaccaacacaatcaaagatattacaggtgatgttagacattgaaagccaagaagctacaccgaacaactgcaacgcagcacaacggatattctcaaagctgactctgttttcataacctggcccagcggaaactcctgcaaaaacacgcccagttttggtgtgaatgttacgaacagaatagttaaagcatgggtttgaaggtctgccctgtgccggaactaccggattaccctcttcgtccagaactgcgttagttccccactccaaataaatcatacggatattacttgcaagtgtgctaccgtctgttttaggctctccataaacaccatcaatcgtaaaatctttacttccatacattacaactgcgccagttgccaaacctgttccaacagatacagtttgatctggatcgccatgaatgttttcgatagaaatattacgaccaacttctacgtggacaatctgacgacaacgttttgcaaaaacgttacgaattgtaatattcttgcaatattgatcatcaggaattccgtaaccatatggtcctttaccagctacaccaataccgataccccagttggacagaggaataggagcgttagtcccatcgatattagacaggtaaatattctcaatcacacaaccatcatcataatgtttattgatgacgttcagttctattgcatcaccttgcatgtccatgaaggtaaggttacggaagacaccgcgtgttactggttcccctgttccttgttgaaggatgccatataacccgtttttaaaagtacagttatcaatttcaaaagtacctgatattgggttgccttggaataccaggctaccaacttgacctgcgcgaggggcaccgtcccacaaacaatcgaacatgcgcacagcaccaccccaatacataacacgagagttacggaaagttgtgccttctactgtagcattttgcacacgatagtcgcgttgaccacggaacacacccccacgcaaagtgataccttgaatatcaaaagagcttgtcgtgaaagtcatatcgcaaccgtaagcatcgagaatcttgcttttcgaagcttttgctgctaacagtgccgcttggaaagctgcttctggtgtggtatatgttgttgtgttgttagcaaattctgacaagtagacaacatcgaataaatcgttgtatgttccaccacgaggggttaacagtccttctgtattggtcagaacccatgcatttggacctaatccaccgcttgtctccaatgtatcggaggccaaaatactttttggtaaacttccagcccaacgataacgaccagcaccacgtccaatcgtctgatttttagctgtcagagttacgttattaccaaagcttgtaggcaaatgaacaaactgtccacgttcaacagctagtgcagaaagatctacagatcccccagaataagtcattactccagaaacagacaaagatgttaaagttcctgtgatgttaggaggtaatgtgtaggaagactgtgctactggatcatacagagctttaatccctgttaacgattgacctgctattgcgtaagccacctcatcatctaacaaaccatatttacgagcaatagtttgcagagggactttatccatgctttctgttagttcttccgtttttgtttctaaactaacaagacgattctctaggttaggatctgtatctgctgaagctacgattttaccaatataagcaaaaagcttgtttggcagtcctgtcgcaggatcgtgtcccaaaggttcagataagatgatcttactatcttctatgcggaaagcttctcccagaacctgaataacaccattgatcgtaacaatagcactatcaaagatgtagggaggactgattactgtttcataaccagttgcaccagaatatacccaaggggtgacttctgttgccaattgttctgttttcagtccccacaatacccagttgttatctcctactggagtcccttgcatagggattgggttaaccaatgtagcgttaggggcgtagtaataaccgctcaatactccattctggaaataacgaagttggttaaaaactgtttcgtttgtgccttgcgcccaatctaatgggcttttaaagaaaaagttgtcaacaagggcttttctcagggttggtatcaaccctgattctgtttcaatactctctgtagcacttccattaataacatcatggagttggttagacgagaaaataaccagatctacgccctgttcaagagacgttgctggatatgttgggaatgttgccattaattaccccttattctgtgtacgtttaactatgtcatctagcatcatttgaatagtcgcattcttgaggtccataatcttttcaattttttgctcaagagtgttattatttgccattaatgtagagttaatttgatttagcatctgggtaagttcggctttagttgcataagttgattcaacaaagaccaacttcttctctagctctcgacttttctcctccatttcctcaagatcagagccgaatttatccattttttgtttgaaaaagaaccagatgactccgattaaagggatgattgcatccttggcaagtccccatgcttcttgaaattccatactgtatcccttactgagtaggtctatcgggccattgaatgttgttcaagtctttcagatctaacaaaactaaagatgctcgatataacttaacagcttttaaccatttttcttgttcctctgacaaaccttgtaactcttgcaaatctgtcaaagcacctatttggtttccagcccacgtcaattctgtctctagtgtagtatccacatcttcttgcgtccaagtattatgtttttcaaaagttgttccattatatctccattgtcttgggtattcagccataccttttggaacgttatctgtaacaacaacacgcatattgtgggggaataatcctactgcatcttcccctacacctaagactaagttatcagtatttaaactaacaaaatatgcatcaggatacttagcatctaactctttcgataaatcataccaatccctgccagaggaatctcttaaaaatcctacccctaaaccaattaaaaagagcgtctcttcattaggttctggagtatatagttcaaaaccatcgtaaacaatattcattatttattctcctacttagtagcttactgttacccatctaccatttacatagtactgcaatggaccagaccaataagaagcaccacgaagttctttcttatcaccgaaagcccaaccagtcataacgtgaccagcatagtaaggggattctgatacacctaactgaatacgtccattaatacgaactgccgttacacgtgcattcacttgactttgaagcgagtttatttgactttgtaagctgttttgcaaattatcaatacgagaatttaaattgctattaacattattcaaattattttgaacgctgttaatgtttgtttgtaatgtattttgaagagagcttaaacgagagttcaaataatctaagcggaccaaagcatttccgtttgaagtatcttgtccactattcgatcttggattgtcaattagaacataaccagcatcatataaacgaacgccagccgcaacgccacctgtgctaggatttctacgatagatgtaaagctggcctccggtttgatactcagcagaaatctcaccatttgtttgtcctgcaaagtttttgaagaacagggttgcaggatctgttgtggaagtgccattaacataaacatcgccaccataaatagcaccacccgcatcacgttttaccaacacatttggtgttactgttgaactagtagcatctgtaatgtttgctgacaagtgattatgactgttatcttgaacttggatagataaagtaacttctttattaccgttccaagtagcctcaccagtagcatcacctgccattgtaatcttagttccaactaaaggcaagtaggtattaggtaaagttggaagaaagtcatccaccaaatagcgaatccataaaccgatattattaagaatccagttcatttcttcgcaagtcatgatttgaccataatccataccaactgtgcggatggtttctttaggtctaattttgtttgtgtttaaagttcctgggagcgttacagtttgtgtagcccagtcaggataatatattggcttcgccatttaaactccttaatctatttgcttgagaagcgtacacatgcgtcctgtttcatccccagtagattccatgtacagggaacctaaaccaccaataccatgaggcggtttggtagcataataagaactaaaaccaaaagctgatcctgcttttgctccaagacggtagctactaataatagggaaaacacttagcaactgctctaaagcttgatcagattgaagacacaggttgtagaaaaacacatcaaaggttttattcaaacctacgtaagtattaagcgtttcacgctctgttcctgtgaaacgggcgaagatatcaattatgtcaccacgagtccccgatgaggctacgcggtaagccctgatttttaatattgttctatactcttcatcatcagagccattacgttcgatccccatttcttcccctagaatatctaggtatttgcctgtggctgtagagatcaagcggtgtttagcaagatagatcattgcctgatctatcttttgcttttcactggatacgatgtagaggagcttgacaatgttaggagaagatttaaaatcttcaatcagaaggtttttaacatcttcattgatactggcccaagttgttacatggtcaacactcactgccatttttacactccatactcgtaagaaatgttatcaaggtcaaaagaagggacaacattataagcaggaactatattattctctgtatatttactgtcatcctcagtattaagtttaacataaacacgaagagaagtcaagcgtccaaaagcaagtgctgcataaataacacctttgatttgatcgttcgttactgaagaacctaactcaaagtaagcttgcaggttttgtaaagcttctacgatgttttgtttttctgttccacttaaagttgttccgttgacagtttgatacacaagttttacggaatacatagcagaagcaccaggagagaagcgaataatttcttgtcctccatcttctgttgtaactgttatgttagttgttccgtgtgtcaaagtgttgattggttttgttttatagataacatttgcaatttcttctgcactgccaccataaactatagtctggaaagtcatagccggagcatgttcttgatcatgtaacgtagggttatcataaatcttcaccttagtaacaccatctgtgagtagcagagctttcacaatagctgctcgtgtccctgcgttagcttcatcaacgttgtcattgaaacgagagcggaattctgcgtctgtctcaacatcccgaccaggagaaaatgaatagaagttaccactgtcaagataacctgtaaaggtagaagatatccctgtaatagactccacaccaacaggattgtatcctttctctgctgcaactaccggaatctcactccacttggttccaaccggaacactagcataaaatttaatgggagttaccagtcccactggagtatcactggttaaagaagtaaaaccaactgataagttacctgaatcagaaaatacaagactacgatcagcttctgttaaattcgccttgataaaagtttcaagatcggttataaatgtagaagaaccaggtgcaagtgttttactgtttagtcctccatccaccgcactttgtgcataaaaagtaatatttggaacacctgtagcagttgcattagcacgagagatttgataagctgcaatcttagcattcaacatagttggtgtgctaacatagtagttcatatcactatcagagttgaagtaaatatccgtgcctaactcataagtccaagctgctttgttattactcttaacataggcataacctgtacttgctgctgcccctgctcgatagaaaccgcgtttagaaaagatttcgtcaagataaataccttcagcaccatccagtgtttgagtattataaacaccttgcataccttcccacaatgtgtaatctgtgtatgcaattattctaaacagttgtccgatcacagtatcttccgaagtggctgcatctgcaccaaatgtgttttttactgctgtcatataattgtttagaacatcgtcaaaagtcgggattacaaatcccgcatctgtcaaaccatattcatccattagtcatcctctttggtagattgtgatctgccccaacgtaaatcaataagatttttcatgaggcgagaaggggttatcatgaaaacaaaagcccaacccatccattcaggaatttctttttctattcctaaaaagataaacatgcctgtcatggttagcattcccagtgcgttccacactttagtagaactgattttgttgtttggataagtacaaaacattccgattaaaaactttctcatggtacgttctcattactttttaaatcacgagatacatctaattccccaaggtctacagaacccgctgaatgcacaagtacagcagcagcactaagactaatggcagtagtacctggggcaatatcagtaggtagggagtaagctctttgagtctccttatcataaataactttatacccacctaaatctacaccaaccgaaaagtaaacaatttcggattgcttaaccctaaaatggcaagctactgcttgcttattggttaatattccagtggagcctttaccgccttgtgagaacatttcgttcataacaacctctttgtttttctaaaaacccctcagaagaggggtgcttatcaatagtacaagcagttggcgatttcaacagtcaatgctagttgttgtgtaaggagacactaacttcgtgttaacgtgacactgttcgaaagcaacacatgcagcggcatacagtgcatctattgcaggcaacggaaacatcgatagtgcacaggcgtcacgaaatgcagtcaaatcgggtttattccctgtgactttaacggcagcatcgggcttcaggtaaaaaccagcactccacccatcaccacgtacttcaagaatggcaacgccaaccgctgtaaatttttcaaatttcatattaaacattctccatagattcgttgttatgggtagaattttttcgatctaactctgtctgtaatgcgttcatagccgctgtaaaggcaggaacttcctgcccggttaaattaactctcagcataaactgcatgatattttgaatagtttgcttatccatgattattcctattaagttgggccaataagaccgtgtgtgatcagagcatcagataatttttttacatatctggccaattctaccagcgtcattgtttcggtatttttgaccgtgccatccgctgttccacttagctggaaaattccagtttgtctgactgaaagaactttagtgctgtttatagatatgttcatatttctgaagttaaatgcacctgtcgcatcttcgtaaccaatccacttcgttactccggcgaccggaccccagtaaatcctatggtctatatctaagtttattgcattactttcttgaaatctcgcaccaagagtgttcagaccatatgtgaagttgattccagttccgtcagcccgtggaccaagttttattcctccataacgatgaaggttagacactgacccttcgattttcagctgttgagtatcttccaaataagcatttttccaatctccggaagggagcacaccaccccttctaagcctcatgcctatccaccagccagactctcctactggacggtttgagccatctccaacgtcaattccaataccacaagctgaaccaccgtccgcagtagtaacgataagacctcgataaggcccctcccctgtgggaaggttttccggatgaggctgagatgagaatgaattcaccagatttaattcacatccgactaactgagaagagcgcactccagagccatcgttaccattccctgcctgaccccaaagaccccaaaccctcccgtttcgtcctatagctttaccagaaccatgtacgcctatagcgtcaactgattttccggaggttaatacatcaccagccgaagatcttacatagcccgagacaccaatcccaaaggctgacgcctccggttcaagggttatcgttccctgcatagcaacatcaaaccattttgtgcccccctcttcccttttcatcttggaggttttttctgcccagattaatgggtaagggttttcggctccggctcctggtaaaccgcgctttaatttgaacccaccagaatagttcctaaacgaaggatatatattaaacgttgcatcaacggtattgggccaatacccttctgggacaaggtaggtaaggcccgtgttgttcgcggcagtaatagctaccgtattggattcggaatcccctttggctccgccagcgaacccaccccacgtaattggttttggaatatcaccaataagaccagccccacctgaatctttcaactgggtggctaaaaccaccccagtgtcagtaagaaagttggaaactgtgcttttaacagtcttatcaggttgatctaaaaccaagtaatctgaaccattaacttttgatgtttcgggtaaattagtaattgtagttgacatttttactcctatatataaaatttttgtgttgttactaaatcttctccagatttagtggctaatgtaattccacttatggtggcgatctcaacatttacctgtttaagagtgatatcctgtaaataaacgttcaaaggcacgttacccatatagaaaacttgggattgagaattaactaccgtgatagaatcatgcattatttgaggataggcccatatatattgtgtaagtccgtcaaacttattggcgttcaacactatgttacctataatcatcttccaaagatatgtgcggtagtttgatttaggatcaaagccatacaaaggtgcaagagtagcatctggaacaaaacctgaaaggtagtgaatatcagaatattcaaaacctaatttttcatgtggtatggtaattgcatcgaatgctttcatcattttaccttccagaagccagtcgtaacactctgaacagtaaaaatcaaaagtttcaggaatgtagtaatcagacggaaagttaactttctccatcaaaccgttgccgataattgatggcaagaacggaagcaatgttaccttggctcctggataagttgctctagtatctgttgcaaactttgtaactcttaatcctagtttacgagacaaaaatgcatagtattcgtcaaacggcgttcctgttttataattatctattgttcctgcatcttgtgcaaataaacctgtttctgtgttgaatgccagtttggtagtgtaatcatatatgcaaggcattttacttgctgtattataccaccaccaaggctcaccaatttgaatgacaactggaatattattagcttgcgaaatagatgctattttattaataacattttgcaaatattccataccttcgtcaatagttggagacaacacataactaggaggtttataccctgttgctgcaagagcatcgttccaatcatgctggacccattctacaggacaaactgtgctcatcaattcaaaacttaaagagttcattattgtgtagcccttctcgtttgctatagaatggaagctgttaagccaagcttctgtagccggattcaggaaaacagatttatttaaagcccaagatgttccattccatgagaactcataatagtgagacattccgttataatggttaatcatcccacgataacctagtgcatatgtattataaataactctctctggagtcaggttatacatatcatcataagatgtgcacatgcgaatatcatgttcaggctggacaaggttgctgactttcatcatactgtaaccagaggtaggttcaagaagagtgaaagtaaaccaagcctcttgactgtcaataggtacaacctcttctatttcttcataccttgctgtaatcaaagagaagaaaatattatctacagcactcatatctaaaggaatatcattattagggccagaaaagatattaccaaaatctaacttgattgtagctgttttaccatcttctgaaatatctgaagcgtagaatcctaaactgacataatgaacacttttatccaggagagttacagtcaaagtcggcaccaaaggttcttctttaaaacctggcatgttttgactaatttccattttaaaccaaagtttctctgaacttaaatctgtgtggggtaaatacccaacacctttatggtcatatttgtcaactgtgctccagataacccctgccaaacctgctgttgttctgtttacaaatcttgcagtaaaagagtctccatgagatacaatagaacaactttccgttgcttgagaatctattgtccaatacataggagagaacattttaacgtcttttgtagtccaagttattggagtggtattttcttggatagtagttataatacaattgatggttgtttcaaccatcatgttattttgactaatccctgaaacttggagggagaagttaagatctattgagttctttggtcgttcaaatacttcaaccacaatggtagcagaatcagcatcatcagggaacacaagtgttcccgattttgcaatataatctctaccagcgactgctgttccatcaacagtcgtgtagttaaatgaactcgcatttactctcttgtctcgcgtgacagtaaatatagcttgtttcattttaccccttactcggtaacgtccacactaatgtttgccattgtcaaaacagtaagtgcaggaatattgctcgaatccaaaacaggcaatgcattttggggattaagttttttgtataaggcatacaacccaaaaccacgtaacaactctccggcgtggaagccaaagaagactccgttatcactgtctggtctaggggcagcactccaacaaccattcataacgtgattaggaccaagaacaatataattttcctgaataagttcaaaacagcgatctgctactattttaatgttaggaatttctgaatcatatccagccatccccattatagcacatcccgccataaagagcgcagacatgtgacttgtaaagtcatctacaggcgcagccacttctccatcgggataaaatattgttggtgttcttccttcgttgttgtcttggaaccacttcagatagttgatccagtttttacaaactgttaaaagtttttcaggaacttctgctcctcgttgtttcagttcgtatactgtatgacacgcacagaagaatgctcgtgcttcataaccatcccaagctttatcgttccaatgatacattgtgaactcattcttgtttccgtatttatgagcatcccaacgatcccaaacataagcttgtgccattggcccaggcatcacaggggcaaacttattataaaaccacatttgtgaatcatataaaaagtctatactgttgttcatacgaacccagtcaatatctctccctttaaaacaatataaggatgggtattgataacctgggtaaggaataccacgccaaccgtcatataatgctgtgttaggatcactaatattggaaaatggaatgattcctggagtataattcaaactgtcaagtttatagtccagtattgtacaatctccaagttttgctgtataaggattttcagatgaaactgtaaccctgaaatacattgtgtaatcatcaccagcggctgaagaatacaaagatgggatatcgttaacacaataaaaatcgattgcccctgtcaagccatttgcaggttcagaatccaatgcaatgttgatctgatcaacagcagtcaggtttattgacgaaggttttgtctctgtgtcgttatgattgggttgccaagtgcttaatttgaaatcagcaggacttaaagctttagtaacccatgcagaatttgttttttctaacatggcccaccatctccaacctgcggaatccgtaatagtgatgttaaaatcatctgcatatgaacgatatgtaatagattttaaattggctgttttagttggtgttaaccaaaacccaacagtaaaaccaccatctgaatccatattagcagaaactatctgatcactatttgtcccagcaataccagttgcatatttatattgtatcacagtattgcttccccagtcaacaataattctgggttcagcaataatatatacaccacctccaggaggttcggtgcgcataaaactagataaaggtatatccatcttagtcatattagctgcaccaagaggtaagccacaacgatatgtcactgtgtctgtttcactcttagtcttgcttaattctaactctggacggaaaagaacaccttcccctgcatcatctacaccttgaaactcaatacgcagttttgaattctgatccactctgaaccaaactgcctgttgttctagagttgtttgtgctgcaacatcttggcgaattactgtgtatcctaattcatcacgagaatatttaggtattgctgtagatgggtatgagtaatcatacgagataccatctgtaaaaggaattattgctgtcgtagatctacggaagaatttatcaaacatatcgatgtttgagtagtcttgacacaacaataaagaagattgccagcaaagccagtattttctctctcctgtgatctgatacatcaagtagtttgcatcacaccaccacgtttcagcatcggaagcattatcttgatagcctaactctaccggaacgtttacaggacggttatgccacatttcattacgcttaagcagatatccaccgtgttctacaggattgcatgtagcgtagttgaatttatagtccccgttcacagaagcatttttaagttgcactgttccatattctgcaaagctatgaccagtagataaaatgttaccatcccaatcaactttacgtcctagacggtctataatccattcaacgtcccactgatctccatattctttccagttggttgaaccatctgggttagttgcataaactgttgcgttaacggagttccaaccaagattgccattgaaagcaaaccaagctttatctaagtattccccccaatgcggtgcacctttaggaataacagtccttccgttaatccaagtcatcatgctacctttgaacccgccgtgcgtaggatacccatcatctgtgagagggtaatgtgctaaacgtggttctttaccattgatgatccagttgggacgatatttagctggaggatcaggaataggttggcccccgaagaagtgatctatgtaggcttgccaatacttctcggcagattcaagatattttttatcccctgtagccaaatatgcataagcaaaaccagtgataagcacagattgaccttcggtagtagcgtcaccgtttggttgcccttcctgcgctgtccagttaataaagtgtctgttgttcgccaatacgttttgtgggttgataatgtaatgctgaaccgtaggatctatggtaagcccagtatttctttccaaaaactgaaccaacccttcaatcaactgaaacgtgttgtcaatattgtgcttaacttttgacattaaataactcctgctaaaactaaactacctgtccaagttgctccattatcataactgataaactcaaaagtgtctgttgcaccttgacgataactcaaaactggggaacgaccaaaactccattttacagaagaaggccatacgactttatttgcaccacttccttgacgcaaagctaaagtaaagtttaaaactgcatttgttgctactggaatattagtaaaactaattgtgcacgttgcagaagataaagttgctgaaaaatattctgccgaactaatatctaatgccaaggtgctagttactgttccccgtgcattcagacggtttctagttacccctgcaccactcaacaacactttcaaagaagttttctttgttattccagcctgatctgttacaaagaaatctgtatcagacacagaggttgtttgtgtaagatcagaaattttgatcgtagttaaatctgccattactcttctactcctgtgatagctgttataccgaaattattgtttgtagctaatgcatcacctttttcgttaaccatgattctttccactgctgactctgtagaccattcattccaccaagtagagtaggtatcacgtggcaaaccaacaaagttgataaagcgataaagtctattcgaattctcaacaatactgtaagcttcacaaatgatcgctgcattgtcttcaccagcttcagggtaaataaactcttcagaaggttgagtattgaatatagatgttactgtatctgctccaactgtgaccataactgtcattgagtaataacgttgatccatgtcataagcagatttataactgtttattgtatctatgtaaacgtttttggcaatctctgctaaaaatattctgtctacaatatctttctttctagcaacaccaataatctcttgtaagtaaggaacaccgaagttagtatttaaaaaccactccccacgatacgtgttcagagttatcccaagagtttgtgctgcgatttctgttctggttgtagtgaggaccaaatccccatcatccatgatgaggtcgttgtttggtccaagttttaagtcaaaagggattcccatgttaggctcctgttggttttaaggactcggcacttgagctaccgctctgaatgttacgaaccgtgtgcgtgtgagtatggaatccgatgccattaccatctgtcatcaaaccgttctgatctattttaagaccattgatatctgccacgccgcctttgaaagttaaattaccaccttttagatccaaagtccctgtgccatctgtaatagtaataccggaggtagtaatatctattttcatcccttgactattccatattgaaatattacctgtagggtcgaaagaagcgtacgtgtttttgttattagaaataactaccttttcagaatctacagcttctgttgaatctgttcctgtagctattttgggaataaaacaaataggatataatccacaaggctgcataaaagtggatgatgaagaggtttctccactagtttgcagtgcattagaaggatctctttcagaaaatataacagttcctaaatcgccagctttaatagggaatgagattcttcctgtcccaccaccattaaccataaaaggaacatcttcaaaagtagggtaatctatttcatcttcgctagatcgtgtgtttttaacaatagattctaaggtgacagtcttagcaccataattaacgccagtcacacggactggcaaggctgtatggacttctgctaattgttctgtcattaagccacgcattgctgtgacaaaatttaatgcgtccattatttctccttagtcattatttcagacacggatacacactccacctcagtaacccactctttaccctctttatcaccattgtgagaaacagaaacaactttaaatggaccatcataatctcggctttttaaccagattgttttctctggtaatattgcaccattcatttggcacttgaatttaacaccgtctgtaggtttctttgccttcttagaggacttggtaacttttttagtaggttttatatcgttgtggaatggttctggacttcctatcaaaccagtttcaggactaatataggcgctacgtgcactagacatttgtgaacgaggagtgacataaacagatccatcttgtattgacacattgtgatcaatacttttacaaatatgttctaggtaatgtgaagtgtttccacacatagctgttgctgaagataaggtttgatcattatctacgtgtatattaccttctgtagttcctaaatcctttaccaaatctgtaacaacacgtttgattttagttccttttggataactgcggcttgttcttgcttctgcaatgttaataccgccatccaaacagtgtaaagtggttttcctgtctaccgagtcaaaagtatcactaacccactggatagttcctttgaagaccataaccaactcttcaccttcgtatcctaccgctaaagcaacagccaagttatttcggataccacggtttatatagttaacagtatcatccgaaaggttataaactacaatctctgcttggttaggatctttgttattatctttcttaatgctgaaggttatttgatggtcttgcaacaaatacaaattagaagaggatttttctgttgtccctaacttggtatccaaatctaccgtagatttaaatgccgagttcttagttctcttctgtattgtgtttgtggcagaaccaattaataatttgtatgccctgtttaaattaggggcaggagcttttgtatactctctttctgccatattatctccttacgcctgattaggtttgttatcaatataaaccaatacaaaacgtttatctcgacctgtagttgtatatccaggacgaccattaatcttaactgtatctactatatataattgaccatctggcacactttcaagatatttataaggtttaagaagatctaaaccatttgtaactttgaaacttatacttggatcatctccagataatccaatctgacattgccaagactcgtccctagtgttccaccttaaacgaatgtcataatcaactccatccaatgtaactgtatatgtttgatcaggatactcttcagttttcagataccatgcaaaataagtagaatggtcctctagataaactgcactgtagcctgtattacttgtagaccttgttgttttagaataagttgtcactattaacctccgttgtttgttggggtattagtagcttcagcagttcttactgtaatatctgacttaggaccattcgaagcaacttgacctttcacatcaccaccagttgacttatttggtgctgtttttacagcaatagcgttagtagtggccttagaaacgagacggatttgttcaaactctaaatcaaattgcatagcaaattcagatttataatcatacgaataacctttgagaataacattttcaaaagttctgtgttctgtcaaaagaactatcggttgtcttgactcaaatatttgatctagatactctattgcttgagaaatcctagcaccatttacacctgcactgtataattgatctcgcataagccgaattggtgtttcggtaattatacctgaaagtttaaatctgttgttttttatttgaacgtggtcacttacatccgatcctgattctactggaaaacttgtaacatctgcctcacgagttacacctatttcagggactgaatcgaaagtaattgctttaaagttttgaatgtattgatcacttgaactattataaacacttgctaaaatgcagaaaccattatcaccctttacagtagatgccgaggtatttttattctcggtagagttgatttcctgttctgccttatagacggctctcaccgactgttgtggagtcattgctgccatgataacctcgtagtaatgataatgccaaaaggaagatgcaagatcttcccatattgattattgtaacacatatagaaacttcgtgtcaagggaaacgaaaaaaccccgccgaagcgaggtattttattaaccaccagtgttagattgtccgcttagagttgaaagagacaaacgttgaaaaatgctatttccgctattttgaattcttgcatcaagaatatttccaaactctgaagaagggctgatcgtaactttgataagatcacttggtattgctaccgtattctcaacaacaggttgattacgagccaaacttacgttaggtgtataggctgattcacgtaaatcttcaagaggattaccaaatccaaaagcacgtgtccttgtttgttctcctctccacatacgaccaatgtcttgtgtatcaatacctgttaaattgtacaaccaatctgctacaggattgctgtctccactttgcgttgcctcgtatgctttttgtgccatagatttattaggatctgtgttgtctccgaatgtatctgggaatgtttctttaagccaattggtaaaagatccgaaaccatctcccaattctttagcaaaacctcctaattgaactgttgtcttaccgagttcttcacctaaatctttggcaaactgatctagcactttaacgttatccaaccaagaatcatctttaggtaaggctttcacaaaaccctctaagaagtggttctgcataccttgacctacaagctgaactgttgcagcaaaacgagtaaactctttagaagcatctatttgttcttgagttaatgttgcacctgttctttgaagcattttcaatacttcattatacccttcgccgtttttactaaacatacgttggtagtgcataaggtcatcaccaaggttttcaagaagtcgcccgatttgagcagagttcatacctcgacgctcaccttcattaacagtagcctgaataaaagctaaaggatcgttctgtaaaggtttaagctgttctggattccatccaaacaagttcataatgtcatttatgccattatcaccgcctttccacttcccttctttctcattccactttgcagctaaaacggtattaccaagacgttcacgaacgtctttaatattatctattgatttaataatatttgcagagtctacaccgttctgttcaccccaagctgtcattgccaaaatagcgttggcgtttgtctgaacgttttcagcaccacggcttacaagtttaattctttcgttagtattcatcaacgtgttaccaactacagaaccacctgcaaacagaccagcacctatcaaagaggatgcaatcatacgtggattaagacctgctgcaccctcttttaattgtccgtatcgacgatcacgatcacgtttttgttgagctaattcacgcttacggttgcgttctatatctctaagttcacgatttcgcatacgtatacgcattttagcttctgcttctagctctctacgaatacggcgacgaccgcgaacctcgtcttctatttcagcattcttttcacgatgagatctgcgtaaagcatccaactggtgagcaagagcttggttcatacgttgaagagttatttcaccctttttgtattgctctacagctttacccataacgtctctagcttcttgcatagcaccaggacttgctttactaaatgctcttgctcggtagttaaagttctgtaaacgaagattacctaagtcttccctacgtgctgctgctttagcttctcgttcagccgctttacgagctttttcttcttctctaccttgtggggttttaggagttctaggtctaccagaaccacctacaggagcacccgctccagcgggagtaggtgctcgcataggtttttggctttgagtttgagctttcttaagttcacgctcaatctctttcatttgttgtctaaacttggtcatgttcatcgtgggttgcattttatttgcaaacttctgaacactcaacacggcatcttttgcttccttgagactgttcttgtccaccttaaacgtaaccacgttactaattctggaggcgttaatttctaacaaagtatgttcctcgtgttggattaaacaagtttcttaaacaaatctgacattttatttgtctggttttgatgttttctctttattgaagtgtctttaacatacatggcttcaacatactcttcgtatgttaaatactcatatagttttaaaagataatctacaccgtagttatctaatgttttcagtgtttccgaggtatctttaacgactttgcaaagaataacctcataccacttcaaagtaagggttttcgttgctgtgtcgatagcatgttcaatcgcaggtgttaatttgctgctaaactcgtcatcgcctgaagctgtgtgaacagttttccgaaacctcgtttgaaaaaagggccgtagtttacctccagaactttagcagtaagatctaacactagttctgggtgagccataaataattcatcaaaattttctgcaacgttataaccgtcttgggtataaacctcatctaaaattttacgcaaaaagacagttaaattcttttcttccaaacctgcaaaaagttggatcagtgccatagcaatacgtgactcaaggtcttcgtctgcggacattgttgctgtgctatacatagtcataggaacaaccagaacactacccaattctggaatcctgtcaaacactttagatggactccacttcataatacggaaagtaacagatctgtttccatctaacggaatctcaactacttcttctggtcgagcatatttttgaattgtgttatcttgttcttgtgacatattttcctctctaatgataaaaagggcatttctgccctttatttattattgaattgtcagagcagagattgagttaagggtgctcaaacctacaccaacttcattacgcagaaggcttgcatctttaagaccaataacccattggttctctgtaatcatttcgccaatagtatcttcaggctgactttgaatccatccaatcgtgctaatgtaatagccacgtgggtcttccaagtaaacactgaatgctacttgacgagtagaatacattgtttgtgcatatgttgcaagtacttcgttagctggagatgtgcgttgcaaagacattgtgagtgttcccaaacggttacgactcaaagctaatgaaacgtccccatcagtccctgaataagggttgataatatcgttagatttagcaataacgattttagtatcagccgcaaaaccccacggttcccaaccacctaatgaaaggataacttgagatgggtcgtaggccattacgccagtaagcattttatccattatagatcctctttattttgataacgggggcttaacccccgccgtattagtttgcagtacggttagtcaggacgttgacctgaactttaacgtaatggaagaagccagcgtaaacatattcaatcttcatcccatcaaccagacgagcattgatttgcgcatcggtcatatcggcacgagaaggaatataaacaataggtttcagatcgacacgcaaaccagtctcttcagaagtaacaacttcattagcgatggaaccgttgaggatacctacttggatcgggttagccagaacagcttgtcgaatcaaagctagaccatttgaagtagcacgaacaccaccacccagcatagactgttgtttaaacagtgtaaacagtgattcttctgtgcgagctttaaaccacaaagcatgaacaacatagtcaacaaagaaaccgctaaccatcaatccatcacgatagaacagagttccatgctctttacgatagatgttaccgttctgttgaacaatattgttttccgaagtctgatccagtttctcgatctctacacctaccagtgttttaccgtgaagggtagttaaaccaggttgacgagaacagatagcaccaacaactgctgcttctgggaatacagaatctgcatcggtcatccacaatgcaaagcaagtgttattataaccgagatcattcagtcgttccagaacgttatcttctgctttcgttttaattccaggttcagagctagagaagaagtaaactttatcattctcttctacccatgcagccaaagctagaacatcttctgtttcatgggaatctgaaagggtccagaaccagctactatcaatatcatgcagagcagcgatatcttccgtaatagcattagcatagacagtttcttgagtgaaacctgtgctgtcaatagaaccaaacttaccttctactggagtgaaagtcattgcagcgccgttgttagctactgtaaacagtgggccataaacaaggtctgcattgatcatttcagtcagaccaactacaatctcttgtgcagttgcagtgtcatcagcaatgaatttaaattcttttttcttggtaccatttttgatggtaattgtgtaagttgcactatcttctacgattggagttagagtaaagtttgtaacttcacgcttaccaaccataacttgatctggtgggaacaaaccgttaaacagtttgactgccataatatacgctggatcatttaatccataacctgcttccaaaagtgcatcggaagaagagtaatattgaatcgcttcgccagttacgttctgacctgtaaggatcaggggaatatcgaactgggtttcacgaattgatgtagcaccatacagtaaagttacggttgctaccttttcacgaaaagttgccatttatgctcctgttagaaacttaattccaatgagtttattcggtagggttgttaaataatgatccattttgattaactgacgagtattcgcctggaaccaaagtaattgcataaaccctgtttagaattaaatctaaagggataggatcattgtaactatctctgaatgaacggatgtgcatgttgattgcttctattggtgtagtagcaatatcttcaatactcatacgagtgttgaacgtcataaccatacgcgctcttaattcagtcttatctccgtctacaattgtattggcttgagctatattggaggctcctaaaaaaccaagacctttagaatagagatgtttgtattttaattcctctgcaccacggagagcagccagaacatagctcatcaaagtggtaggtcttccacgataggctacaagttcaatctcgtaggtattatccatctcgtaggaatacatatcattttgaatagagcttcggtaagaccaacctccagaatcgctggaagtgataatacgtagtgctaggtaaggagtatccggtttaatgaatggcttatccataacatagactggcaaccccactaattcttgaaggaagccacctatatttaagtagatggcattttcgtatgcttctatttgttggtaaatattagccaaagtttcctccttctgttccataagaccaggagttgttttgatcgtctaatatcgcaacacagtgatgatggactaagaaagatgttctggtccaatctttaagggaataaacagaataccatttaccatctatcaatatctgatctgataactgttctgttccttgttgtaaccccttcatttctgttttagtccagaaactatattgagccttagatctgtaaccttcaggtagtgcattcagtgttttaccagatatcggttgtaagcttgccgcttcaatagtaaatggttcatattctacactactttctaagttagcaataactgaaccaactgcctctttgtagactcgtctacgaccttggtattcagttagatcaaggagagtaaattgatctagtaacacttgtatctcctttttagtatacatcaaaaacaaagtttatgcaagttattttttagacttgctttttgtgatttttgtttcgattgcatttatcatatatgccgtatctattaagatatgattagaatagttgcctttatcttgtcgtatcttaattgtcacaggagataaaggacgataacgttgcattgcaatcgcttgagctattccttctctagaggctctcgctataggctcaaaaacagccaacccaacattgttcattaggtaatttgcaaaaacctgcttcatctttttagcgatattgttctgtgagataacagcaccatctgttataaaagggcgagcaggtatgttgtttgtttcattaccatattgttgaatagctgctattgcaggaatagtgagatctgattcaggatgccttttgtttgttaaaaaaccagcttcgatttgaacttgttcaaggtccatcatctttttgataatggtttcccaatctgtatcgtcacctggtaagatctcactttccattatttgtccctacgataaaaagaaacaggtccgtaatttcgcaaataattaacgttgcgggtattacgatcaacacttgcaacattaccaagaccattcacagagttaggatcgctgtttactcgatcaatctcacgagcatccacaccgccaataagaactttactggttgctcctcgtcctgccgtgcacccaggaatgaccataagaccatttaaatagttatgatagatatcttcccacggagacttataagttacttgaccgttgttaaatttaacttcaacttcgacttcacccatcttttctctgcgggacatagctcctcctgtttgagtactgttgttaagaacatcgttgttccatagatactctaaaacagaaatcaagctgttccacaatactgcacacttatccttatcttcattccctatgatatcaatccaagtttggatgatctgaatcagcattgcatctggcaatacttcttgagaagggttataaacaagaattcggatcagtggtgccaactctaccgcattcagcataagcccaccttattttttacgaagggaacgttttttagctggagtgtctaccgcttctacttttaaaacttcttctttgatttttacaggtgcatagtcttcgtaacttacaagatagtaacccatgtgttcttcacttgcaaaaggatgcacaagaatacctgtttcttctctcaaacgcgtgaggaagtgaatgaagtttccacctaatgcaatacgaccatctttcagatagaaagacattggtggcgcagatactaatgttttatcagcatcgatcagtggtgaaagcgattcgaaatcacgaatcatttcgtgataactaaagtaacgtttcaattctgggtttgacatatcaatctcctcgttgtaaactcttattgtaaacagaaaaggctcgcccatcacggacgagcctctaatcttaacagagttctattaagccgtagtcagtttaactaccagttctggacgggtgttaactgcgagcagcgagaattcagactgaagctgaatagtgcggtgctggctgatcatgaaggtatacagttcacgagcctgggtgttagccagttctggagtatccgcaggagcgtagtgcgcctggaacataccttcgatacccataggcagaacatatgcttcaccagcaggaatgttaccgtggatatcttcaatgtaagttacaccgttccattcgaacacctgaacatccatgttaccgctaaggcggtcacgcagaaggttaggagttccctggaaatactgatacgcctggcgaacaaatggagagttaaccagagatgcgaaaaattcacgagaacacagagctacgatacgggtagcggtagagccatcttgtttagtatcgatgatgtaagcacgagcttcttgttcgatagtggctgctggagaaacagtggtagaagcaaagtctacagcaacagatttctgggtagcaccccattcggtataccagttgtatgcagagttagctgcaccacctacgccgttataggcacgacccataactgcttctgcaaagattttctctttggtttttgctacgtcacgcagaatctgggacatataacggttaacaacttcagcgtctgtgcgcagagagtcattgattcctgccattgcaaagctacggaaagattgaatatcttgagctttgatgtttttatccagagggaagaacggaatgcggaacgctttcagttctggatttttcatggtcaggaagttacgctcaccaccacgctcacgagcggagatcagagcatcttcagctttttctttaccgatttcaatagcggtagttgaatgatagtcaacactgaacagattcaggctggcaatcagtgtatcaggggaatcctgaagttcgatcatagggctgaaatctacaacctgatctaaaattactgctggcattatattaatctcctattaaaattaagaagtgaaaacgactttttcggtcagtttcagatcatgtgtttccagtgctgctacgccagcgtcatctaccagggagccatctttgtagtatactgcaaagcggttcagagtaagatcacgtacgccaacaactgcggtgaaagtgtcacctactgctacatcgtcaataccgaacagagcatcagtccaaatcagaactttagcagcatcggcagcttcagctttagcagcttcagtgttgtcagctttcaggatagaaccaattttcatggttgctgttttaaccaggttaacttcacgtacacagtgtccaaggtcagagctaaacactccacccagaaccaggtgtccgaattcctggcgagagttagataaagtaattcctttagccatttaatttaatctcctaagattattgtttctgggcttttttaagttcagcagctttctgactaatcagttcagaagaagatttagctacaggttgagtattgatcacatcaacaccacgttctgttccaaattctttcttaactgcgtccacttctgcacgtgctttttcgaatgctttgacgatagtttcagcgatatctttattgtctaccagatatttaacgagagcttcaactttgtcttcttctacgaaagaataggatttaacaacagttgtatattcttcttcgatacgagcttgttcagctttacgaagttcttctgcttcctgttctgccttagcgattttttcctgtgcttcaagttctgcggctgcacgtgcatctgcggctgctttttctacagcttcagcgatctgtgctttcatcagttcttggaattcagcagatttcaggaattcttctttgttgatattttccaaaggggtttctcctttattgattccagttgtgtttgcagatttatcacctgcggggttagcctctgcatccacagagtttgtattagctttagcgtgagctttcactaaataatctttaacttgactttgtttcaaggaactcttaacgagattactcaaagcatcgtctaaaacgtcctcaaagaaatcaatggagatcattacatcaccatcaacaacttgataatcagtaacacgaacaacaggtttagcaacctcttcaacttcaacattcagtccgtcaactttaaagccaacagagaacataccgttatctgaacagaaaattgcaacgttcgcatcgaagtcagcatcaataacgtaaacccaatcccaaccagcttcaaatttttcacgcactttttcagaaatgcgatccatcacttgttgaatatagcttttacgtaactctgtaacatcttctcccattttagtgagagcttctaacttttcaaaagttatgtctggagatccgtctgacttaaataaaaggggggtattataaccagatgccgctccaccttgaaaatcaaaagtgtaagcaatatgagcacctagtgactcttccgtagcttttcctgaaaagtctacgttagttaaatatgtatttgccacgattagtccttcttgactttaacgcccattgcgcctatactcaaacctttaagaacgccgtctttacgagcttgatataattcagggtcgttgaattggattttaacgaggggagttccttccacaacgagttcgtcaccaatgtaacaatcgacttcatttacccaagctttaattggagaaaacttatcggtgttcttcatgtgaccaagattaccactaatgttggtaatattctcattgaagttgtcaaccatcttcctgatttccaaatcagacatgcgctctccgtggagatcgtcttcttcaggtggacaatacaagacctcaataacctgcatcttttcttcatcaaatttattttgtttgactagagtttcaggtttttgagatggtatagaatcttgttgggattcagaattctctttaaaaccagcgaaggttttgaagagttcccacagtgtatctttattgagttccatttgaaacctcttaaaaacagatatcccataaatcttagtctacaggatatttgttgttttgtcaatagaaaaattaaaaaatattaaatatttttaattcgacaggttttgtgctgaaggatctaaagcagaaacagtatcagacgttccagttcccgctgtagctaaaccatctcctgatcgtgaagttttgtcaggcatatagttatccatgaattcaaagaatttctctttattggcaacaatatcgtcagggatgcgatattcaaaaccaattttttcaaggaactcgttaataacttctggggttaaaggtattgcaccagaggctaccaactgctgaatagctttagcatttacttcaatatcaggatcacccatttcaccactgacaaacttaggcatatcttcatcagaaaggaagatattgtttagtcgtagtgtttgagggatcagttgagagtttatagcttctacaacaatatctacatctcgctcaataaaatgagacaatagtgtttgtttgttgtcagaaagcgcaaaacttcctgcatcaccatcacccataatcaacacacccgcaccaaagcggttataaatatctagcttgcgttgtttgattagtgcttgagtgtcaaactgtttacccgtgccatcaacaccttggaatacaagatcgtattgacgcatcactgtgccttcataaacgtctgaaggcaataccatgtaggcttgctcaccagagtgcaggttagcgatgttggcttggagaactcgaagagattgtgcttcatccccagcaggatctaaagatgccctgtttagaatgtcacttggaaccttaagaactggcataccgcctaaatctttagataccccaataacctcaaattcctgaataagagatttttcacgccagctacgatatacagctaaaagcggactaactcctagtgggttattctctgtaatgttactaccaacaaataaaactttactgaaaggaatttctttaataccagtttctaaagttgtattacctggagctaacatcgtattggtgatattctggttaacagatagaatagaacgtccgtctgccgaatatgtaaaaggttgagccatgtgaagagtgtcttgtggtctaaaagccagtttggtcaatcgccaatacccaaagtaaggacttttaggatcttcatccaactcataaactttctctgcgaatgcaaaaccatattgcttatatgtcaaaagtgatctaacatattgacgtagaggggcttgcatattgcgtaacatgtaatcaataaacttagcagcttttcttgactttgccgagtttacattgtattttatcttgaaatcaaagaatgctctatctacaaagatatatgtagcgtcaagagcagtagctacatcagggtcttcacccatctctttaaaagtgcgaatacattctgggaaacgagtctcataaggttgcatgaaattcgtaaatgctttgattgagtttaatccgatcgttcctatttcaggtgacaggagtaacgttttctctttctctgcctcttttgttggagagagagcagctttatttgcagcacctttgtcccagtattctgactttttagtgtacgttctttttcctgttgacacttgttcctccagtcaggtataaaatcgttaaggcaaggctgtattatatacaacctcacctatctagttataatacactttaaagtgacttttgtcaacaattatcttttacggacactatacggttggtgaaatccgctgttcattctactgtatcctgtaggagcatttgttgttgcagggatagctactgctttgaaagtattctcttttgacagagtattgaaacaagaagcagcagcatcgggaatgtcatctttaatagtggctgtagatctttcaccattgaaagattccaattctttataaaagtgggttaaagtttccacattagggaaagaatcttcaacaatataaacaaaaccgttttgacacgcactactaaaaggcataaaacgctgaagctttttcttgttgcctggcatagcatctggtttaacaacaaaaccctctagaataagtttctttgcagactctgtatattctattgtcccagccccagatgggtctttaggaagaactactgtaacttctggtccatcaatcttacattgatttagaatcaggttatccctttccccaggtaatcttcgaaaccttccgaaaattttacttttctcatccacagcatcataatcatagtcaccaaagatgtagatattaccatcttggtctttacccattttgacagatgttgtatagtctggataacgataagtttctgtaggaactgaaacagctttatcccatgctcgcattagtttaagattattaggaacatctttataagatatcttatgcaaccattcacgttggaagaaagactctttctgtatacgtgcaaaccaacagccgtccaagagttgtgctcttttgattgctgtttgtgatttaagctgtgctaaataattagggttaagcctaatcaattctgggttatcaaatattgtcccaccgataaatacgaaagtttgtggttcaataacaactgtctcccctgtattagggttttccatgaaacagttttctggatatttttctttcagttcttcaggtgtgtcagcaaaaacaggttcatcattaacaatgatgaaatatttttgtttaccacacatatcttctctaggataaccaccctcatcgagataaggtaatacccaattcaaaacccaactatctgcatcggggttacatgtgcacaacatgaagcttgtttctgattctgaacgcatacgtcccagaagatagagcatttcatattgcgtgaagtgggttaactcgtcaaaacctaccattgaatactgtgtaccctgatggtttgtttctgctgttacgttatcattttccaaatggtcaaatttgagggttccaccaccagttgcttcaaaaatgatatccattgtactttcttttacgtgcggttgtaaaggaagatacaaacgttttgcttctgtaaacagaccacctggtttacggtgagcagtggtgttcttacggaaaagtattccaccaaacaaagggtctttgtaggcgtattttaaagctttcagcaatagcagacgagacttgccgctattcccagtaacgaagcagtgatcgccacgtctaaagacaatatagctgcttggagtctcaaaacaatatttcttatcatctgttgaaataacctcgtgtatttttaagtaagtgctctttttaccaggtatgttaaaaggaacacgtttaccgaatggattttctacataaccttgcaggggttttcctatttgctgtaatgcaataagatctcctacaagaatctcgaaatgtttctttgatttctttttcttatagaatacaaaacggtgttccatactaagttcttggaataatcctacaccatttgttattctgtatagattatctccatttaaatcgtattctacaaaataaggtgttaccaattctaaacgcttattcttaggattgtattggtaaatatcctctcccgaatattcactaatctgtctccaaccatcttttgtaagatattccgtttcagcagaaacacatccagcggcaccaccataaatcataacttctggcattaaatccattgcaagagtctgtttacctggttgagcctttacttcaatatctactccagctaaactacctgctgcctttttctttgccacattccctccttattcagcaataatacctttttcttgaagtgttttaatatatgcttgtaaacctaaaacctttcgtctatcttgctcccaaagagcattgttttgagtttggttgttgacaacttcagatctactaaccccttttgcaatttgatttttagtgtatggcacaggtgtcgatactttatccatcaagtccgaatctggacctttaaccttttctattgctacggccttacactcatcaataagaactggggaagcttttgttgatgatgaacaacccgtcatcattaggggcaaagcaagacatactgccagaattagtttttgcataattcgttgtatcctcattgatcgtttgtttcttcttctctaaatctgcttttaattgtgcattgtttttagacaaattgtttatttgggtatttaataatgctctttcttcatctgctcttttttgaagaacatcaaaatcctgttttgcttttgcttgggctgcttgatataattgcgtttgataggcaacaccatctttgtagccagactcatgtatcttgttataagcaaacattccggcaagaataagaacaacaattaaaacaaaacctaatacagttttagtctttagattcattatcttctacttcctcataaaattttattttaggaagagaaggggcgttgttaactatcttcttcacttccatcggttgagcctccgctaggatctcttcccacgtcttctctgtcatcataaagttcttcctccaagttccaagcccgtgtgtaatcattctttttatctttatgataagaagaacggttaaaatcatttttaactacaaaattgcgcatattttatcctcctcatatctgatcttatcacaaaagtatatacaattgcaagtattaaaaataaaaaagcccctaacctttcggagaggggtgttaaaaataacaaggaggaggggcaaagccccaagagaggagagggattagattacgatctttttaggaacgtcatctgtattctgcacggcaggagtttcttcttccatagcttcataatgttcttctaaccattcttctacttgctctttaatagctttggctgcttggaagcggagaggttttgctgcatccttatcattaacaagttcaacaatatatcgcatagcttctaaataatgctctgcaaataattcttttacacttgcttgcgccgcatccattgcatagatctgttgcatttcggctgttggtcttccacgaccacgttttagtttaggcataataaaatcctcctaaactttatcttaacatataaaaaataataagtcaagttttattcaatagatagcaaaaagcctccaataaggaggctaataaatactgttaatttgaaatgctttattatgattgtgcgttaaggagtcgcacccctccatcttagaaggaaccaggcaaggtcttcaaagataccgctggcaagcgatatttggaggcgggaattggatttgaaccaatgatctccagcatatgaaactggcgaggacgaccagactcctctatcccgctattatgtatcccgtgctggattcgaaccagcatcacaaaaattgtggatctcttatcctgtaagtctaacgggaaactggttgtttcgacaagaatcgaacttgtgtctcacgattatcagtcgtgggttctaccattgaactacgaaacatttaaaagaatatctcacgtctgatacagactaaccttttgtctgacgcatgaaatatttaattggtcggaattgcaggattcgaacctgcgaccctacgctcccaaagcgtatgctctaccaaactgagctaaattccgttatatggctggtctgtctggatttgaaccaaacctacgacagtcaaagtgtcgtgtgctaccggactacactacaaaccaataaatcatttaatgaagggcaaccagaagaagtgtgagagaaggagaaaaccatgagtaaaagagaaagttttctggcaaccctttattaaataatttggagcgttatatcggattcgaaccgatgccaccgacttggaaggacgggatgctgaaccgctaacactaataacgctttgtatatatttactatactacattttactatcgaatgtcaatagttatttaataggtgggacagtgacgagtatccctttgggtgactagccctacgttcggtaagctaacttaaaataatacaaaaccaaagtcaaatattattcttcgttgctgtcgatgggagagccgcttcttcttttgccccatccaaccctactccggtcaagtttcaggtaactctttgtgtgatcaacacaatactaagaacactgtctttcgaacagaccttgtgcacaggatacgacgatcaatcacagtgcccttaatgttgtgttggtgctcccactctgaatcgaacagagatccacggattacaaaaccgttgtaatagccattatactataggagcaaagctgggactcggcaggattcgatacctgcaattccagaagcctcttggcgactggggggtttaccttaactctacaagtccataattctggcgatgagtataggatttgaacctatatcgttctttcgaacacggattaacagtccgccgcttaaaccattcagccaactcatcttaatttggtggtgagtgatggagtcgaaccacccgaatcgcaatgataacagatttacagtctgccccgctacccctacggaattaactcacctaaatgctaatatttaaattctttttaaaatagccagtgttcacaccactaactatgaggtatcggtaaagtggttaccgccacttgccgaagatttactctgctaaagtaagctatattaaaaagaacttggcggtagatgtaggactcgaacctacacgccgtttccgactacagtttagcaaactgtcgtggctaccatttcaccaatctaccaatctggcggaaggagggagagtcgaactcccaaggctctttcaagctcggcggttttcaagaccgttttcgtcgccacgtcgatttgcccttccatacttataatctaacataaaataatgttagttgtcaatagttttttaaaacattttaccatgaatggtgactccaccaacccccgttctcagcgaacggtgctcttcgagcatttatgtcttctaatataaccgtggcctttgtttataatgtctgacatacttacctcattctctgccaccatgatcagtagtgggttcaaatcacttgagctaattcatgttaaaatgttctggtgtctttacaaggaatcgaaccttgactaagagtttagaagactcctgtgctatccattacaccataaagacgttggtggccctggctggtttcgatccagctacctatcggttatgagccgacagctctcccattgagctacagggccataaatgtggtaacagagacgctgacgattgtagagaaccgctacattctctaagaccaagcccaactttcagcgtaaaagttcttgagccgagactattccttttcctctttggtagctaacctctgaagaagtagtctctaacactatccgcagtgcaagcctctcttaacaaaagtcaacgaccctgttaccacacttgatgaacgtatcctaacatatgaaggatacgtttgtcaatagttatttaagcatattctgctacttcttcactatctttcttttccagaagagcaacaaccaaagcttctgcgttaaaagtattaatttcaagatccatctctcgcatcagagccaagaaatcaataactttaacatctttagtgattacaatagaagttgtaccattgttttcagatgtgtatttttctggatggaaaagaaaaactgcattgccgttaccatcttcaaacacgtgtttttctaatagagacattgttcctcctaatctgttagttgttcgtcctctaccaagtttgacacgagaacgtctgttatacattgatgctgataaaccctttcgggactatcatcaaaagccaaacctgtgcaaatagaacagaggtctgattccttgatgactccatttttatcacgtctggagtggtttgtcaaatgcctattacaagcacggcacctaaaataaaaactattttgcatatatccttcgaaccccaaatggggagtgatcggcatctcctcacttctagtttagcacgaaggatatcttaagtcaactaggaataattttatcctttttggtttcataaccagtccaatctaaatcctcccagccttcatcatcgtctaacacattgtcatcatcataagatgcaatgttataaatagaacgtggattacaagacatacaatctttaataggcacatgatgccatttgcacggattctcactaatcattgcacacctccattcttgttaagatgtttcgtactgtacttcatactgatctatagatcaagtattatttataataatttattattttatttttaattgatagaagttgatctgtacgtaccagttctgatacactgtacctgtttgttagatctaataattatttattattaatatttaataattattaatctagtacggagtacagtacttgagtacagagtactacatcaacaacctaaaaccttaactcgctgcgctcgttaatagatttctagggtagcatacttcgaagacaaaagtcaagagttttattaaaattattttctgtgtgcaaaaaccttgcttaaacaggtagcaatagtatagtctataacataagcttcataagaagctcgtagagcaagttaacttactaggtaaggtgatttacatcttatatataaaaagtgcgtcagagacgcgtttaggaggctagaatgagatttacaagacaagaggtggttgtgctggacgaagcaatgacaatgatcgtcttttactacgaggatatcttctgtgcagcatatcatttaaatgacattcagattgaatggcagcagatagcattcttgttggacaagagtaatcatttagatggctttgagtatttggaatgggatggtgcaaaggaagttaaaattgtagggttaaatcacgatcagattgttgacatgcaatgtaagttgtgtcattatcagttctcaaacaaagtcaaactcgaaaggcaattggaggtggttaaagatgatagcactaattagtgagaatccagtccttgcaacaattgttctgatttttgccttatgtgtggttcacgatattctggtaagctattttgacaataaaggaggtaagaaatgaaagacgttattcaaatggtattccgtgtaactctagatggtatacacgttgttaaaggcacacagaactacacagaagcgaaagaacacttcttagagtggattgatacactgaagacacaagatgtgtcctacagccgtgttacgcttactggcgaccataccccaatcatggagtacgtaaagaaatgagcaactatccaattacaggcgtaacctattcttgtgtagcaaaaggtggtttatatacggtagtggaatttccaaaacctgccggaatatctaaagtgtttgatcctgtggttatctatgaagatcttagaacaggtcaacgttactggagatttgtgaatgactttttagatcgtatggaggtagtaagtggcgaaaacaccgaagaagttatcaaagccaaagaacgttactaagaaacagaaaaacgaggttctcaaagtagccaaatcagttcctaagaaagataaatttgatacggaggcattcgtctttgacacaccaatcgagaagattgaagaagcgttgcaacgtcttgaggagcaggaggcagatccaatggctgaaccactcacggcagaccaaatttattggtggggaatatggactttgcaactaccagaagcaaaacgaagaggaatgacttcagttcctacttgtgcaaaagaagcggctgtgttaggtttgtatgagaaatctaaaaagaggagcaaaaagaaatgatcaagactttcctgaagtgtgtaaaagcaacagataatgagtggtactctggattattcacggctggcaagaaatacgagatcctcaacgggacaggcaagaagttttctctcgttgtaaacgatgaaggtacgaagcaaatggtatttgctgaaagttctgtttatggtatttttgaagtagtgcaagaaggctctccaatgattctggagtatcatggcactaataaaccatatactgctatggatgttatcaacaacaagaggaatgcaaaatgattttactctattcaggtaaggcgaaatacatgcaaggtgttaaacgcgtagaggttactaagacagtaacaatcggaaaatcctttatagtctattatttcattattaatgggaaggagtatgttgtagcaaagaccttggttgataatggtaaaacgtggaaagtggaggcactatgatccctgtagctgggtgggtggtattggcaacactcaatgggaatgttactgtggagactaaaaccatcttcaaagcaccagaagattgctataactctttggtaacttggcctcatgatacggatgataaggcagagtatcagtgtttttacattgagggtaatcctgtagaatttgaggttaaagtgaaggaggaaaaatgagaattaaagtaactaaagcttacgatgataacccgaagtttatctctttgaataagagttatggtgtagaaaacggcgatgagttcgaggttatcgatctttttgaagaccacggttatattgtcaaagccccaatcacagagcaggctattatcatcttacgcacagaggctgttgaggtaggttctgatgagcctcaatatgacagcccatacatgacagagtggatcgtagctgtggatgttggaggtatggtttctgtactgaaagctcctaatctccatcctggttttacagagaacggtaagacagctttggattatgggttgccagaagatgttgagaatacaccgccaggtatgtaccgttggatttgctctttccatgaagagaaggattgggaatcagggcttgtagatgattggcattttgaagtggagagttcttttttaatcatgccagcttagaggaggttatatgaaagtttggatagatgatatgcggaacccagccgactatggacaggaagatgcaatttggtttaaaacgtcacaagaagctatggcttttctcaatgatcctgctaaactgtatcgaagagtaaccgagtggtcttttgacaatgatttaggtatggagtcagaccaagatgggtatgatgttttcctgtacctggaagaacttctggcgtttggtaaaccttgctttggttcacccaccattttcgtgcatacttctaatcccgccgctggggataaattcatgcttgcaaaagaatccatgctgcgttatggtattaaaatgattcgtgtgcactattaaggagagaacatgcatcattcggtttggtcggaacaagaagaggacgaaggttactttatctaccgagaagaagaggattggcccgacacaagtaatgatcttttacttccagatactagttttatcgaggataacttaagagaggaggattaggaaacaatgagtggtattgaaaacaatatttgttaccaacctcttacctggattggtgagggtcattatgcgcaacgtgttatcgtctgtgctgcgaataagtatattttgaataatggtgaagagttaattattccttgtgttcgacatgcaaatcctgtactatatgcacagttaagcgtgttgaaagaagcaggtgtaatcaacaaaactttgtgcacaccagataatcaaggctttatcgatcagtattacaattggtggagtcgtgcggatgcttacgtcatcgcggaaaatgctgaccagatcgaccatgagcgtaatggtcacgaccatgaattatttagcgagggattatactaatgtttattacaagcgatttgcattttatgcataaacgtattcgagagtttgctcctgaatatcgtccgtgggaagatatggaccacatgacagaagccttgatcgaagcatggaacaaatgtgctactactcctggtgttaagatgtggcatttgggcgacttctgtttcggaactgaagaagatacccgtaaaattgcttcccgtctccaaggagatatcacctactgtgttgggaaccatgactacagcaaacaccgagaagtgcttgcagagtatggagaagtggtgtattatgacgaagtgaaatatcagaagctgttcttcgtcttaagccattaccctatggcctcctggaataaacaaggtcgtggatcaatcatgctacacgggcattcccacggatctttccctgatgaagcttatggtaaaatgttagatgtgggttgggatgcacacggaaaaatcttgcattttgatgagataatttctatgatgagtaaacgagatatcgtgactgtagaccatcacaaaataatcaaaggagagtaatgtgactaaatttaattgcgacgatttggttgaaaaaggtttagttcataagaaaacatataaagaaggagagtattctggtctatctgttcttaagtataagaacaaagttttctgggataacttatggagcattgattctcgtcttctagaatgtcgcggaatcgttgttgatgctgatgacaatgttgttatttggcctttcactaagatttttaatcgttttgagaatggcacagatctaccagcggatgaacttgtagatgtggttcgtaaagtaaatggttttatggcctctgtaggtgtatataaaggtcaacttattgtatcgacaacaggaagccttgaatcagattttgcaagtattgcaaagaatcatattgtttcagagtgtgatgacatagaacatttcatcaaatggacagagagtgcaaaagcaactttcctttttgaaatctgcgatccttctgatccgcatattgtcgaagaagaaccaggtgcatacttaattggtgccagaattcaaaatcctgatgggacaagttttatgttacctgaaggtgctcttgatggaattgcttctgtcaccaaatttaagcgtcctgaagttcattcgatggttaagttttcagatgttgttgaaatgtctaaacattgtaaacacgaagggtttgtagttcgtgaaacaaactatccgttcaacttgcttttaaaaattaaatcaccacactatcttactaagaagtttcttatgcgtggtggagataaaaagtgggatctgatttgggataatccaaaaaatgccaaacaaattgttgacgaagaatattacgctttgttagaatggattcgaaataattttacgaagactcaatgggctgctttaaatcagcaagagcgacgtgaaaaaatcgaaaacttctttgggggataaatgaaacaacttatcattttacgtggcgtttcaggtgctggtaaatctacggtagcagaaattatttctgaaggttattggcctatctgtgaggcagatcaatatcattacacagaaagtggtgtttacgattggaagccagaaaatgtaggtaaagcacacgcatggtgtcagagtattgttcgtgatgctatgaaatctgatcttaaaaagattattgtttctaacacttcaaccacagagaaagaacttaaaccttatttaactcttgctgaagagtttggttatcaagttatctctttagttgttgaaaatagacacggtaacgattcaattcacgaggttccacaacatattcgtgatcaacaagagaaacgtcttcgtggttcacttaaacttcaataaggagagataatgcaaatttatacagatgatcgtaaatatgagacaattttagacgaagatactggacgaattaccgttctccgtcacggtgaagagtggcgtgatgaaactggggataactatatcttatctctgattcatcttattgaacaaatgcgtgatgattacgctgaactgcattatgaaaatgaggcgaataaagtaaaatttgaaaatgaattagaagagaaagaatcagaaatggtatatctaaaagaagagatctcccgtttggaggaagagattgatgctcttcaggaagagatttacgaactcaacaacgaactgaactcttaaggagagattatgaaaaaagatatcgttgttgttggttggctgacttgcccttgtggtagtaatgacataactgtaaacacagagggtgataaaaattatttattctacggtgataaaatcacttgcaatacctgcggacgtgttggtattatagaaaccgatgattgctgcgtttttgaatcttgggatgaagatgaatgagtactgcattttatgttcgtagcggggacgaggattttctagctacttttgatgacggtgatcttgaagatatgtatgaagatatgcttgactatgccaaagggcaaggtttcacaagcattgattatatgttggcaacatctacaacgttactcgacgcagatttggatgaagtgtgtaacagattgaaaatttcagtttttaaatgggaggactaatgcaacaaacaaatcaaacgctgtatggtaaagattcaaaaggaaaacttaaacagtggacagtgtatacagatggtgcagttgttactgtagctcatggaagggtaggtggaaaaatcacagaaaaatcttatacagcagaagcaaaaaacattggtcgttccaatgaaacaacaccggaagaacaagctgaacttgaagcttttgccaaatggacaaaacagttaaagaatggctattataaaacaaaagaagaagctgaaaaccatgttccttccacaccaatgaaatgccaggattataaagattatcctgaaaaggttgtgttccctggttatgcacaatacaaactgaacgggttacgttctatgattaacatgaaaggggagtgtttatcaaaagctggggaagtgtataacctaccacctcattggaaaggtattccaaactttattagtgaagttgttggtcatcctcttgatggtgaagtgtttgctgggttaggtgtccttagtctgcaacaaattaacagtgcttggaagaagcataatgcaaatacacctttgctgaattattacgtatacgatattccagttccaggcctaccgtttgaaaaacgtgttgatgctcttgctgctcttaaggcagtagttgaagattatggtcttgacgagcttatttgtgtagttcatacagagtatattgaaaaccaagaacagtttgatgctttctatgaaaaagctttacttgagaaagctgaaggtgtagtatatcgtaatgctcacggagtttacgaatttgataaacgttcttatgacgttattaaacgtaagcctcgccacacccttgaagttaaagtaacacattcaaaaagtgataaaaatggcgatggagtgttgacaggtgagatggaaaatggtaaagtagtcgaattcttaatgcgtaaagatgctcatgagactatcaattatcgtaaagcagagaatgcttctaccttgattaatcagttcgttgaaatagagtatgaagaattttcagatgaaggtattccaacaaaacctgttggtgttcgtattcgagaaatgatcccaggcacttgggaaccagcagaataaggaggaaaaatgttcttagccattttaatcgttttcagtgtgctttctttttattgtatgaatgcttctgaaaactttcctaagaattcaaagaaaagaaccgtatgtgttgcgattgattcatgtatgtctggagttgggtatgcggtagtttcttgtttcttagcttatcattgtgcaaaatacctggaggcatttttatgataattttagcaacaattcttatgatgttgatagcaattgctattataattctggcatcttttccggcggataaatggtatttcaatattccacgtatgcttgttttcggtttcgcagggatttacatgggtgagtctgtagcaaatattagcaactttctagaaagctattttaaataaggagttataatgatcgagaatttttttaaagatattaaattcgatactgaatttttcaaaaatgcagcaaagcacgtgattgattggaatgccaaagcacgaggtggtgaacaaccggaattcactcaagagctatttatgtcccaaatcgggttcgttcgtgaagagcttaaagagtatgaaacagccgcgaaagtaaacgatcatgtagaactcttggatgcagcagcggatatttttgtagtatccagttatctgacctacatgttctttggtgaagaacatacgatgaatttcttggactatgctgtaggcgatgtttttactccaactgtgtatactgattttgatgctttggaacaaacatttacagagccagttcaaatggcactaatggctgctggtattatgcgtatgtctcgtgacactctaatccgttcaaaatatccagaaaagaaagttattaaagaggtattgaaaagtaatgattccaagtatccaactaaacaacagttgctgaaaacttggaaaacttcggatatcgattcagccattgcacaagaatgcgctgcaattgaagaacgaaatgccaatcgtccagaaggggcatacactggtgttcatgctgtttataatgaaaaacagaaagtgtatgtgttctttgatgataaaggtaagatcatgaaaccatcgacctttgtcaaacctaatattgcaggtattattaataagtaatgttgtaagccgccctttatgggcggtaatgtgagatgtattaaataggaggaaacatgtttgtaaaatcttttaaatccgctctgcctatggttgttggtgacaatgcttctgtagcatcccttaacagcattacagatattcctctggaatttgtaacagcagaaggctcccagtcacacactatcggtcttgttcgtttcgaagatgactctaaatttgtaaaagagttttcagatcttgaactgcttaatgtaggtcaatctgtgaagaaggtagataaaaagaaagttaaacgtattctgaatgaacgtctagaagaaatgcgtcaggacatggagagcgaaggtaaagagttttatgtcgataaagaagtagtcaaagcaatgaaagaagatattgaatttgcactattgcctgaaacagaacctgaagatttctttaactatgttgtcttggataaaactacgaatcttctttatgttcttaatggaagtaaaaaggttgcagaagagattacttctttcctccgttccgtcctggggactttcccttcggtaggttttagtgtgcacgaagaagctattgtaaaaggttttggtgaattgctggagaatcacgaagcagatcgtattactctcggaaattatatcaaaatggaggatagcgagggcgttgttgtttggagtaaagaatctctatacgagtctaaagctgtagaactaaaagaagatggtaaagatgttgttgcaatcggtcttgaatatgacggtgttgtagattttgtagtggataaagagtttaaactttctaaactacgttttccgaaatattttgcagacgaagaaggtagtattgaagcttcagtccttctgtgcttcaatgagattcgaggtctgatggaagatttaaccaaagcaacaatccttaaataagttcttgacttgcgggattagttatgatattatgcctacctacttaatgaggtaggctttttaggaggcgttatgaaaaagattctgacagtcgttcttttagcttttagtttcacagtagcagcaggtcaaattactttaatcttgtctgattctgaagttaatggcaacacaaaatattgctactattctaacgctaaccaagatgaagttatagcaatcccgaaaagtcgtcaatgtccgtatactaaaacattctcaacagaggatgacgatgaataattagggggaaatattagcggttatattttaattaaacctgaagatcttcatttatatgtcaacgaagaaacagtagctgcaattgattatgatcagatcgctttccaagcagcgtctgcattagagaaaagaacaatcattgccaagcacatcccttcaggtgctcaaaaggaatttaaaaataagacagagttttggggtaaaagtaagactaaaattggaggttggctaggagatacaaatgcagaaagagcctccaaaaacaaacgtcccttcacaaaggaagagttcgaaattattgataagcaatacccgccagaagatatcggacacaccttccaagcagctaaaacaaaagtcttaggtattctaaaacatctacgtttagaaaaatattgcggagttattggcgtaggaaaaactttcagacacgccttcaaaatgcctgtagaatataagtctgaacgattagatatcaaaccacttcagctttcagaaaccaaagattatcttgtggagttccacaatggtgatgttgttactgtaatagaggctgacgatgagttagagaagtatggtttccaaggttataaagattataaaaggacgggtaaattttcttatattgtagtgtctatagataaagatagtttacatactcctagtatcctttttaatttctacaaagaggatggagtatttaaaaatccagatataattcttattgacgagtctattggcgacatatggatcgtagataaaggtaaaaagaaagaagttaaaggttggggaagttattggttagcctatcagatgctaatgggagataaaacagatagtatccgaccttatcaagattttgatattaagtttggagatattacttgttttaatcttctctcagcttgtaaaactcaagcagagcttttccaaacagttaaagatacttactactcgtggttcccagatggtgttaattttacttcttgggatggagaagaagtccatatgacaacagacgaatggatagaaacaattttccagttggtatacatgaaacgctgggataatgacgatacaacatttgagagtatgcttcagtcatacatctcacaacaggaggcagagtgagcagattaacagaagagcagaaagcagatatccttagtatgagtgcagagggtatgtcttctcgcaatattgcagcaattgttttaggtagtccaacaagaaaaagcacagtaaatgatttccttgcacgtttcggtgcaagtaaacaagagccagttaaaaagaaacaaccagttattaaaattattgatgttgaaactgcaccagagattgcatatactttccgtcgattcaaagccttcatttctccagaccaggtaattcgtaggggttatttgttatcttactcttctgctgatttgtatactggtgaagtggaaggtaagaacttgtcttcttatcctctttttgatattgatcatacagatgattgggagctttgccaagatctttggaaccttctgaatgaggcagatgtagttgtggcacacaacgggtataagtttgaccgtgcatacattaaccaacgatttgcatatcacgatatggctcctccttctaattatgtagttgttgatacattgaaggcagctaagaaacaatttgcacttccttccaactcccttaaagaaatgggagcatatttcgaaacagaaagtgaaaaactggataacgaggggttccctttatggaaagcatgttgtgaaggtgatcgtgatgcttttgaacgtatgcagatttacaatgatggcgatgttgtttcactccgtgatttgtatatgaaaatccttccgtggattccacagcatcctaacttatccgcttattacccagatgagaaagtccgttgttctcgttgcggcagtgatcatgttcacgttgttactggtaagcaataccacactgcggtaagttctttcgatatcattcgttgtgaatcttgtggaggtttgtcacgtagtagagcaaacaccagatccaaagataaacgagcagcaactattattggaatctaataatcagggagcttattgctcccttttttattgacaaaaatttgatattagtgtatactctgctaaccacaataaaaggaggaaatatgagcattacattaacaggtaacgaaattttcgaactgtttgaaatgttaggtttgaactataccatcgagaaagacccagatttacttgacgttaaaataacaattcaagaagatacagcaatctacaatgatgatggtgatgttatctatcaaggtagggtagcttattatacagattacccagaagaaggcgcagtaggaattcaggaggaaaattatgtctaatgcttttgataatcaggttgacggtgatcactacacaaaaatggcaatgcaacctatcgaactaacttatttggttggtggcacaccttgtttttgcaaattggcaaaatacgcaacacgtattaaaggtgaacgtcagattaacctagataaagctattcattgtattgaactagaaagaacccttatgcaaaataacacgtatatggttcgtgaaaattatccatctatgacaaatgcagctaaacatgatcaagctatgcttcttattgatttcttcacaaaagatcctttaatccgagtggcactgaaacacatgtataactcttcttatgtagatgcagttgaagctattaaacaacttaaggaacgtattagtggcgagcaatactaaacaatatggagcaggagaagtttataaaatattcaaccgaaaaggtgataaacttttactaactttgactattccagaaacaatgtgcaaggcggggttagaccgccttttgttttttaaacacaatatcccaccaggggaatatacagctaaaaaggtgagcaatattggcaggtgaaccaaaaataatgtggggtgaaggaacaccctggaaaacacaagcggaattttatacttatcttaggggatgttttagaaaagcatggatgagacaccctaataaaattaaggttatcaatgcaaggcgttttaaagttgatcgcgtagataaagacggcaatgtaatgctagataagaaaactggaaaaccaaaacaagtttggaattgtgagtgcgaaatatgtggacatagaggaggaatgaaagacttccaagtggatcatattcacgcagcaaaacaacttcaatgttttgatgatattcctctttttgttttccgtttgatctatgtgaaagaagaagatttgcgaatggtttgtaaattgtgcaactctattcttgcttatgcagacaagcaaggcatatcttttgaagaagcaaaagctgaaaaagaagcgatagctttgtgtagagctaagaaagataaagcatggctgaagaagcgtaaaatagaacctgaaagcacagtagcaaaacgccgtaaacaaatagtcaaaatcctattgcaggaaattgaaagttagtataagataactatactaaaagagagaggaggttttatgcagatagtatgtgattgggatttagttgtggctccgttagatgttgcttggttagaatggttgaataagattagtggccttggtgttaaaatcgacacattcacaaaaaatgcagattatgatcttaccaactattttcctggtttcagggaagagttcaacatagatccttacggatttctggataatcctcatctctacgatactatgggttttgttccaggtatgccagatttcttaaagtatgtttcaaggaaaggtagcaatcttttgatcgcgagtgtgacaaaaggtggtcacttaagttctaaacataaacatgttttaagaacattagatacgattgattttagcaaagggtctggtaacggcttttttgctacgaaagaaaaatacttattaccttgtgatatagcaatagatgacagggctgataacctattatattttccagatgaagtagttaaaatatattttaatacaccttataaagataaccatctagaagaactaaagaaaaaaccaaatgttgtgatcacaggtttagaagatcagtggctaacatgtttggatgtttttaacactttgaacaattttaaaaactaaggagaaaaaatgacaaaacagatttcggctagtattattgcacattccatcactgaagacggaaaagagattgtaactttcgaacttgaatatccacgtattattcattcagaactgatgactcaccgcctgttcagtcgtaacgctgcttctagccgtgctatacctgttaaaacactgatcgaaatggtgcgaaatcagcctgctcgtccttatcgttttggggctaaccaacctggtatgcaggataaaggtgttgatcatgacgcgcttattgatgcaggttatactgctcaagagtggtgggatcttgccgcgcttagtgcagcacgtttcgcagaagaattctctttggcagggtaccacaaacaagttgcaaaccgtcttctggaacctttccaacgaattaaaacagttctgacagcaacagaatatgaaaatttctggtggctacgtgatgacaaagaagccgatcctactatcgaagctttggctaaagagatgcacagagagtatgaaggatctacaccagaagtgctgaaaccagggcaatggcacacaccttatgtagaccatttctatgataatattggcacagaaggtgacgatcattttgtttttggtggatactacgttcaagatgaatctggagaagttgttgtgcttactttggaagaagccaaagctatttcagcttcgtgttgtgcacaggttagctatcgtcgtttaaatgcaactaaagataaagctttagatatctatggtcgtttgctaactgggcgcaaggttcatgcttctccgtttgaacatcaagccaccccaatgcaagaaacatgcgaacaatatggagagaactgttttgaagatttgtttatcaatgctccttgggattttaactcttgggaaccaggtattacccatgtagatcgtaatggtaagttttggtctggcaatttcaaaggttggattcaacatcgtcaacttttaacaaatcatactaaatggtgatctgtttaaatagttattgactttagtattagttttagtataatatagcacaatactgggaggaggtgagtcctcccattcaaaatgaaggagaaaatatgtcattagtaaatactacaacttgggctaccgtaagcatgtctactgtaatgtctacccctatctggaaactagaatcaaataaacacaatggtaatatcccacacgagaaacaaaatgctgttattagagcatcgcttgtaatgctgggtatggctgaagattcacactattctgttgagcgtaatgtgaatatccgaagcaataacgataagcgagtagtgtttgcaaatacaacgcttttcactttccctgtttcacctaattgtggttttaaacgaatctaccaagaaaatgatatttttcattttggtgatgaagaatttacaggttggggtgcgtcacatattaagatggatgatttcggtaactcttatgatcctgcgaaagcagatgatactaatcaatgagagggacaatgactgataataaatatgaaggctgtgaaatcgaagtctattttgatgaaactgttggttgtaatgtaactgtaattctagacacttcaaaacgtttatctcctaaaagacaagaagcagaccgtcgagcaaaagcaaaagggtttgatgacataactcattttgaaggttttctatatgctaatggactttttaatgaaatgaagttcggttatgatgtagatgttttgaatatgcattaataatagggaggagaagttgattcgttttgtaactaaatctaacggtaagacagaggagtttaatccagaaaaacttcgcaagtggtctgaatttgcagcaggtaaactaaactggtctgaaattgaattagaagctgtgaagcggtgttatgacggtgtgtctacacgtgatctgcataaagcaatgattgcagcgtgtattgacaagaaaacacaagcttacagtgatatggcaggaaggcttcttctgggtatgatttacaaacaggctcatgggggataccacagtatcccttcactgaataccttttatcatgatatggtagaacgtggacattgggctaaaatggattatactgatgaagagatcaaagaaatcggtaagattgtaaaacataataaaaacctaacttatggttattctgttttacgccaaatggtagataaatatcttattcgagatgcggtgaacgatgtagtacatgagtcgccacagtttcttttcattggtattgcaatgaaggttatggagatccaaccaaaagaacgccgtatagaagatattaaaaaactttatacttatgttagtgatcttaagattaatctgccatcaccatatctgacaactctacgaactccaatcaaaggaagtgcgtcttgttgtttattccgtgcggatgatacggcagaatctttagctattgctaattacttagctcacgaatatacgttgaataacgcaggtattggtgttaatcttcaaactcgtgccacaggtcaaggtgttaagaacaatcgtattattcatggtggtcttcttccgtatctgaaatggatggaagatagtgttggagcttcgaagcaagcaagccgtggaggtagtgctacagttacctttaccatacttgaaccagacttcgacgatctgattcgactgaagaatccaacaacacctatagataaacgagtagacaaactagattattctattgttgttaaccgttcgttcttgcgtcgagcagcaaaaaacgaagattggatgttagttagttgtgatgatgctcctgaactttatgaagctttgtataaaagtgaagaagagtttgatgcagtttatgacaaagtaagccgtcgtcgcattaagaaaaaatttgttaaggctcgtgatcttctgacagagattattgttcaacgtgcagaaacaggacgtatttacatgttctttgctgacaacgttaacaaccatacacctttcctggatacggtgtatcaatcaaacctgtgtcaagagatcttcttaccaactaaagctttccacagtatgccggatctctttactggtgagaatacagaagatcaagaattggctttatgcttcttatcttctattgttgctggtcgtgtcttacctgaagaatatgaggatgttgcatactacactgtattgacaattgacaacgttattgaaacaatggattatccatttaaacataacgaaataactgctaaagcacgtagatctattggtgtaggcattacaaacttagcgcattacttggcaagtaattttgtaaattattcagatgcttatgctaaaaaattaatgcatgaacttgcagaacgtcattacttttggttggcaaaagcctctctgcgtctggctaaggaaaaaggtaatgcggaatggatcgataaaaccaaatggcctcaaggttggctaccaattgacacttatgctaaaacagtagatagtatcggtaattttgatcttaaaatggactgggaaggcttacgtgctgaaatcattgaacaaggtggtatccgtaacagtgtcttggctgctattgcacctaatgagtccagcagtttggtaagcaatactactaactctctgtaccctgttcgtgatactattatgtataaacaaagtcagaaaggtagcgtattatttattgttccagactacgaaaaactgaaaatgttctaccaatccgcctgggatactccggctaaagaccttgcagaaatgtatggtatctttaccaagtttacagaccaaggaatttcttgtgattcttggttagattattctaaattggtagggggacgtttatcagttaaagaagagatgaaatttattttgaactttgctagactgggtggtaagtcattgtattaccttaatagtagaacaaaatcagcagattctttagcacaagaagattctgaagacgaagggtgtagtgcctgtaaaatgtagtaggagaacagatgaagaagggtaaacgtaaagttaccgttctcacagagaggggagaaatccccttgattgtggatgttgaacgtagattgtgggaaggtggtgttatcaatggaaaaagggttaatacattcatagatccttcctatgcagcttggaaaggcatgtttaatcgtgcatatagtatggaaaacattagaccaggttataaagatgttaccgtgtgtgatgcttggttcaccttttcaaactttgataactggtatcaagaacataacgtggaaggctttgttttagataaagatcttgttcttgaaggaaatactgtttactgtcctgaatattgtaggtttgttcctccttacataaatacactcttaagttatgctaagaggtatgaaagaaaatacttactaggagcacatgttaggaaagatggtaagatttatgccaaagcttctgggagcaaaggtaagcatttaggttacttcgctacagaggaagaggcacacttcgcttggctaaaggataaagctaagtcaatcagggaaacagcggatcgttacaaagaggaagaacatttttatccagaggtgtacaacactcttgtaaacaaggcggatttctattggcacctggcggaaacaaaaacagtatttcgaggctaaatataaaggggcttcggccccttttttattgaggagagattatgagcacacttatagttttacctggagtaaccccaatctaccgtcctgggtttaagcctttgttgattccccctgaagattttacccctgtttggtgtcaccattatctcggcggacttcaaatagctaatatccagatttgggaatctttttatccagaagctacggcttacgcaataacaagggcaagaagtgaagaaacagtgactgttatactcggtagaagcgtatggcaagcattagaaggtttctaccggactaatggtgttgaggaacatgatattttaaacttaaaaggtttttgtgaaatagtggaggatttaaatggcagcaattaatttacataacgaagtttacaaaacaggaaaatatccagtatttttaggggaacaattagggatttttgattctgttaacgtaacttatccagaaatgcataaactctacaaacttcaaaaagcacaagattgggatgagaatgaagttaatctggatcagacacgtaaagatttcgtagcttgttctaaaaacaactatgatgttatgattaaaaacttatcgttccaatgggaaaatgattctcttgcaaaatcaatcatcactttgttctctccattcttgagtaacaatgaagcctgtgctatgatgatgaagcagagtgaaatggaagttctccatgcgttaacgtattctgaaataatccgtcaatgtactccagatccaattgaagtcatcaatcagattatgattaatgataaaattttcaatcgtatgggtatcattgctgatatcatgggtcagttggaagaagctggtcataagtatgctctaggattgattgaagctaacgatgaacttcgcttgctgattcttaaagggatggtagccctgattggattagaaggtattcagtttatatcttccttctctgctacttttgctatggcagaacaacaactgtttgttggggcttgtaaactgatccagaaaattatgctagatgaaatcttgcatgttaagatggactatgctgtaattgatgcattgatgcatgacccaatttggcgtaaaatttacgaagataatattgaagagttgactttgatcctcgacactgttgttgaacaagaggaacagtggtgtgactacctgtttagtgaaggtcgttttattgtaggtcttaacgccgaattgtctaaacagtgggtttatttcaatgctgctcctatttatcgtcgattgaaaatgaaagccaagtttaaagcacctaaacatagtcctttagcttggatggaaaaatggttgaatcctgatttgattcagtcagcagcccaagagattcagttaactaattacaaattgaattcagctaacaaagatctctctgatgatgaggagcttgacttcgaatgattttgaaatgtgttggtataatcgacacattcaaagacgtttttgataaaggggcttcttatgaagcctctgaaatgaagaatggtttttgtgatgtattcggtaaacgcctgaagaaaaatggcgatccttggctaggagttatgtcttgtggtcatattattgtaaatggtgttgccaaatttgaaataattaaggaggaatagtggctgaaaaacttattttttgtcctgtgtgcggtgggacgggacagatggaagtggaaattatggtaacatttccttgcctgaattgtcatggtgagggacgagtagtagtctttgaaaaagaagggttggaggtagaagatggagagtgaaaaagagtatgttcgcattccacgagaattaacagatcacattgcagaagcaatagctttcgaagctagatgttgtggaggcattgcttacgatatttatgaagcaattattaaagctgctcaagaagaggaggagatgaaaaatgggtattgatatcgaatggcgtatgttacagggtgcaccttttaataagtgggaagaggctgtaggagaagatcctagaattgaagaagaatttgatggagattttaactggttcttacaagaaggtcttgacttaagtcgaatctctcctttctacgatgctgatgagtcttattgcatatatggtatttatttagaaggcggagaaggaagcgtagctgtagatcttgagcaagtaaatgagaatgcaaaagaagcctatgcagagctacttgaaaaatataacattaaaacggaaactattatttctcaacatgtctggtaaggagagaaaatgaaagtagaaaaaacaaaaattgaaggtgcggtaattatcaaaccagacgtttataaagatgaccgtggtttctttttagaaacatataatgaacaaaaatacgaagatatcattggtagacaaactttcgttcaagataacatgtctaaatcaaacttcggtgttttgcgaggaatgcactttcaaacaaataatccgcaaggtaagcttgttcgttgtgtaagtggtgaagtattggatttcgctgtagacttacgtaaagatagtcctacttacggtgcttgggacggtgttgttcttcgtgcacgacaccatacgcagttttggcttccacctggtttggcacatggttttatagttttgagtatggatgctatctttgaatacaaatgcacaactccatacgacccttctagtgaagaaagtttacgttgggatgatcctgatatagggatcgattggggcttcgatatgatttttgatgaaggttttaaacctatcctatcaacaaaagatgcaatggctaaatcttttcaacagttacgtagcgagggtgtatgctaacatatctggtattgggtggtaatggacaactgggacaagctttacgtaaagttgcccctgcaaatgtatctttaatttatcctaaagaacgtgtagatattacaaattttgaagctgtgcgaaacgctattgttgaagattatgtagatggtgttattaattgcgccgcttatacggctgtagataaagccgaacaagattttgctactgctttggctgttaatgcttatggccctgcaaatattgcggcagtgtgcagcaaacttaaaattgattttgtgcatatttccacagactatatttttaattattctcatcctatttttgaagacactgcacctaacccaataaacaattatgggtatacgaaagaacttggtgaaaaaatggtgcgaggagttaacccaaatgcatatattattcgaacagcctcggtatatagcgaatttggaaataactttctaaaaaccatgttgtctcgctataatgatggacaacgtgattttattattgttgctgatcagttctcttgtccaacatatgctccagatttagcagaagctatttttgaagtattaaaaacaggttggtcaaggtctgttaagacttaccattttgcaggaagccatcttatttcttgggcggagtttgcggaaaagatcttgacacagatgccagaacctgttaagatatcggcggtatcagcttcaacctataatgctccagcagcacgtccggtgaagtcacaactaataaccagtcactatcttacaaaatcagatttaaataaaggtattgaacagtctttagcagtattacttaataaggagaggtaatggaatttgtaatttttggtaaacctaactgtcaattttgcgaaatgtcaaaacaactattaaccatgcgcaataaacagtttgaatatttaagtcttgatcaagactatgatttagaatcaatgactaaaacagttgttgatcttaccggagttcctccacgcacatttccacaaattctgtctgaagtgaacggggaggtaacatacgtaggcggttttaccgaactgcgtgatctcatggctcaaattgcggagtaacaattatgaaaagtaaacagaaacgtaagatcttttctcgtgctttggcaaatgagctgaagtccaacataaagaaaacgaaaccaaaacgtgaaacttctccagaacatctgttgtttaatgagttggatcacggagtaggagacgacgaataggaagtaaatggctaaagtagtagatgagtttgatatgctacgagtcgatgaaggactgaagcttactgtttatcaagatcatcttggttattggacagttggcataggacaccttctgactaaaataaaagataaagcaaaggctattcaaatcttagataatctccttggtcgtaagaccaatggagttatcacagaaaaagaagcccgtcaaatctttgctgacgatgttgcaaaagtgaagagagacataaaaaacagtgctatcttatcaccaatctatgataaggtgagtgatactcgtaaattgggaataatcaacatggttttccagttggggttaaaaggtgctgaagggtttaaaaatagcttgactttaatcagcaatgcatattatactcaagcaggtaaaaacatgcgtaaaagccgatggtatagccagacgccaaaccgtgctgaacgagtaattaaagttctgacttctggaactttagatgcttacaactaataaaggggcttcggccccttctaaaaggagtgctactatgggaaataaaaccgcagctaaaacacaacggcagaaactggctaattcagcaaagattgaaagccgttatgcagcaaaagcggtaggtaatgacgattaccgtttagatgaatttatgcctgaaggggaccaaaataagattgttcaaagcatgatttggaatgatctgactgttgtaaatgctccggcagggactggtaaaacctctgttgctttatggaaagctttgcagatgcttcgttcaggagacttccgtaaactactttttatcaagaaccctactgaagtcggagatgaccagattggtttcttgtctggggataaaacagataaactagcagcacactatgaatctacaaaacgtattttccagcaattcatgacagccaacaaattggaaaacgatattggatcaggtaagatcgaattgaatattcctaactatttgttgggggctaccctggataatacaatcgtcattattgacgaagcacaacttatgtcaacagaaacacttaaacttcttattgaacgtgcaggtattaatacgcatgttattgtattaggcgatgttcgccagacatatgcaattaaaaaacgtagcaatggtctgcatcaaattttggaacttttatatccagaaaatgaagaaggtgttcgtgagccaattgtagattttattggatacgttgaactgacaacggacgataataaacgtggacgtttgtctaaactgattactgaagtgtttatttaataatgtggcagggaagccatttataaggaggattgatgggtgtagcaacaatagctatcggaagaagcggtatagatgagtgctatcaaacgggactcgtaaaacctaacgaatttcgtcaaatttgtgtaaaccatattgaaaaagagattgctcttactttagagaatatgaccctccgagataaactggaaatgtttaaatgttggtgtctaggagaagattggcttttaaaccattttcaagaactttctgatagtaaagaaagcttgtttgattgtataataggaatagctggctccgatcctagccttctgcacataacagaagaagaggcgaagttactgttcttaagtaatttgtttaataagaaagcactgcttgttcgtgattgcagtgatcttcttaataacccgctcgcaacgtctgatcaaatttttgttgacaaagagacactacgtgcgatagaatacatctgcaaatatgtgaatggcgggaaagcggttcttaaaacattaacagaggaggaagaatagtgacgacaattattgcaaccaaaaataagattttgagtgacggtaaggtaacttttggtggacgtgtagattctattaatttcaaaaaggtccgaaaaattggagattaccttgtaggtggtgctggtcgtctgacctccgtgctttctttctttcaatggtttgaacaaaatctacagtgcgaagcagcacgtgatgctgtccctggtttgatgattcactctgatccagataaagaagatgaagagtttattgcacttgttgttcatccagacggacgtattttcctgcacgaaggtaacaacccaacacgtgcatatccgattgatgaagaatattatgcagtaggaagtgggtcagactttgctttagctgctcttgatgcaggggcaacaccagaacaggctatggaagtagctaaaaagcgagatgctttttctggtggtgaaacatttattgaagaacaagacgagattattgaattaacagatgatgatttagaaaacttctccaaagaagaattgatcaatcttttgaaattcggtaatccctacggtgaagaagaacctcgtaacgtggcaggtaacgaggcggatactgaagaaaaatctgttgcagaaaacaacttgacttctaaatctgaaaatattaatctcgtaaatgtggcggatttcgaaggaaccgctatttaacaaactgccccttcgggggcatttcttaaacataggagattaataatgttacaagttcctgctaagtttgttgaaggcgctatccactcttaccgtcaaacatgtaagagggcaagaaactgtttagatggtctggtggcaaaaacctatactgttgaaaagaagaaacgttggtttggcaaagatgtttacgaagttaatatttttggtgaacataaactaaaccacgatactcctgaaaacatgttagaaatatttctaagagatgacaaaatatctcctatggattaccaacttttaaaattttatgattcttctttggctattgataagtttgttgaagatattctgtctagaaaaacagataaaaacacttatcctctagaggctgatcaaataggattattaaacgagatttcatcctttaaagagttggataatattacaaaagaggagattttagatggcattagattatgatcgcccaacgagcgattattatccgacaccgcaaaaagcaatcaatagtttgtttagtgttatagatttcaaaaatctaaaggaagaaggttgggtttttgcagaaccttgcagaggtgaagctgaagcgatttatcgccattttcctgaaggttcagaatattgcgaacttgaagaaggtaaagattattttagtcacgaatgggaaaatcgtcccgacattataatcacaaatcctccatttaagttagcaatggagttcttggaaaagagcttaaaagaggcggatgtttgtatttatcttcttcggttgggcttcttggagtcaaagaaacgacgagagttccatcaaaagaatccaccaacaaaccttatagtcctttcagaacggccttcgtttgttgcaggtggaacagataagacagcatacgcttggtatgtatacgacccaaagaatcgtttgggcctctctcaaccattttattttgtttaaggagtgtgaactatgggtaaactaattatgacagtggctattgattttgatgaagtagatgaaagcctcaacctttcactttctactgacgtagatggcgaaatggataatattgaagcagctactgctcttttcttcaaaaaagccattgaagtttatgccgaacatgctgcaaatcaggcagtagattacggtggtatcgtgcgagctttagttcactctaccgagggcaatgactgggaagattaatggcttacaattattactgcatttatgcacatgagaagaaaaaaggtgacactgggactaacgtttatgcggagtccgaatctcatgcaaaagagattggtgctatccttttatcacgctggactggaaataattacagtgcagaagatatgtttgcagaagtggattctagtatccaagaaggcaacataacaactacgtgatatacttatactcccttttcggagggagtattttaaggagggattatgcagagcggagaagaacttttagagaaacaattctcaacgcgtcaacaagctttaagttatatggtttttctaagcaatcttgatgtgaatgagatacttttacggcgcgaaggtaatttctggagcgttaaatatcatgcaacaaggtctgtaatctacctggaagaggcggaattctctttggtagaatgatccgaggagtagttatgcgttcaactttcactggcaaaataaatgctggtttgatttttacagcagtaagcattcttagcaaaaagtttaaagttgttaacttacctgtgtgtgtcgatttcgatcatgtttttgatccttcgaaccccactcgttgcatagtaaggagcaatgttgaaaacccaacagaaaatcttttttatgtaacaaaaccatctcaaagcatacttaaccaggttgaggcgaaattgatacctaacggtaaatattactcctttttaccttgtaagtcggttgaagtagagaatagcaatactttcgctaataacttgtctgtattcgttttctttgtttcacaggaagacgaaacagatgaaatggtagcaacagtgagatcactttatgactctttaggggttgtttatagtcaacaagtgtgcgaaaataataaagcctgtgtagatttcattatcaacggtatttgtgtttgtagagtagaatctttttggctgcacgatacatatgtgactgtagcagaggttatatctgaaccaagatttagtcatgcggtttcgttaataatttgaggaggaaggaatggaaattactacagaacaagcccttatcgacgagggtcgtaaaatcttagaaaagtatttaggggagattcataaaacccctggctatttgggttggagaattgttgaagctgtagatttccttcctcgtaacagtaaaaacgtcgaaatgcgatctcttttcttattagtaaaggtggatggggatacgccttttaaagatgccgcagaacatattgaaaaagttgaagagaaagcttatgcagaatttgccgatcttgttttagaacaagagattgaaggaaaggtgaatatttttattttcttagattttgaggaggataagtgatcatacacagagaaattactgttaaaagcgatcaagatctttttataattggagatctacacggttgttataatttgtatgaaaaaggaaaggcaaagttaggtatccgagatacagatgtggttgtatctctaggagatcttactgaccgtggaaagcaaaactttcgttgtgttttagaatttactcgtaaacacaatcgctacgctattcgtggcaatcatgaagacatgatgattaaaggtatgctggaaggagatcgtagctactacgagtgttggtatcaaaatggaggatatacggtctttgaagaatgtggtgaagaaggagctacagccttagcaatgatgacagaagatttacctgttgttctcattgttaactacagaggcatgaaacttgcgtttattcatggtgggtatccatcttctttggaatatctccctgtaacagatattccagaatacatttcgaagatgacaaaaacacaggaaaaccgttttgctgaagcacttatgtgggacagagatatggtagactgtgctaaagagggaatgaaacttcctgttgtgatgggtgtggattatgtgtttcatggacactcttatgtaaaaacacctattatcaatgcgaatcgtgtttatatggatactggatctgtgttcaataataacttaacatttgcttatttcgatatggacggtggtcttcaattttattcaactcttgaggaggattaatgtataagattacaattattcaaagtgtaggtaatatccgtaaagaagttatcttagaaacagaagatgttaatcttgttcgtgagattgtttttaaggaagataacctgcaaactgtagaatcggatgcaccgaatcttatggtggatcaagaatattctgaacttcgtcgtatttttgaagagattcagaagaaagaaacacaacctaccataaaaccttttggtccttatgatccgagcaatcctagcagtccttggatcatgagaaatacggaaccctatacaccttttgaaattacttgttgaggtgattatggcagaactgttctatacgggagttggaagtagagacatatctgaagaagagtgggctttgatggtaggcatagggaaatggctttcaaaccttgggtttaaattaaggtctgggaaggcagagggtagtgattctgcttttgaaacaggtgtccaagagtctgaaaatcctactaacaaggagatttatgttccttgggaaaatttcaaaggtaatcagattccaggtgatgttattgttcttgcaaaaccagatacaatgaactatgctatctctgtgcaatggatcaaagatgttcacccagcttatgaaaagcttaagcagggtgctagaaaattgcaccaacgtaatgtgcatcaagtgttaggcagagatttggagaatcctgctccatcatgtttcttgttggcttgtgctaatactgataaacatggagatgcaaaaggtggaacagctacggcttggaagatagctaaagccaataatgttccttgtttaaacattcgtgggaaaacaaaacaagagatttacgattttctacgacctttggtaatgagggcaataacaagtgattcctagacgtaaacgtggtgaacaaagaacaaacttggcagaaatcttagattacaacatggttaatgatgtgacaaaagaaattctccctgttgtagaagatattcttcgtagagggttacgattctgctctgatcgggtgcatttcatgtggacacataaaagtgactccgctttgaatttctatcctttggactatactctgaacaatacggagatgaaagatatcaacaaatacttaatgggatataaagatataacagaaactgttcttggagaattggcagaaatcttggctaacgatatccttagaaatattaataaggctcttgacagaagcccagcaggagtagtagtatcttttgctgtgccagatatggttaaatatgagtctacaatacctaataaagcttatgcctttcttcggagagacgttcgtggaaatgtgttggagatggagtcaaactacaagattgaggaggttttatggcagagttcggatcagtaacaagttttgaaagtaacttcgttaccgcttgggaagcttgggatgaaatgggtgttggggaactttatttttacaatgtaacactacgtccagagtatgcttacctggtaccagaaggaacagttcaaattggcatgtatttgtcttctcaagacggtgttgttcaatttgagttttattctaacacaacggacaacgaatttacataccgcgcatttcatgtcaacatgtctttaggagaggagaaattttatgacgaccaagtttaaaacagtagaagaagccgtaaaagcagcttatgaggctttagcggaagcagagcagttagcagatgagactggtaaaggtttccgtttctcccctgaatatgggatgggtggttattatgatccagaagacgaaaatgagaacactggaacaaattggcatccatcttctttaagttgttaataggaggtaaagtgggaatcgaagatatcaaaggttataaaccgcataccgatgacaaaattggtaaagtgaatgctattaaagatgctgaagttcgattaggattaatctttgatgctctaatgtctgaattgtgggctgaactggacgattgtgaagatttggaagagtctaccaatatatccacccgccttgaccaaatttcaatagcaaagactaagttgaaagaagcttctatgtgggcctgtcgttccgttttccaaccagaggagaaatactaatgagttatcgtaatgttgaagaattaactgaaaaagcccaagctattatggctttagtggacgaacttacaaaagaagctgaagatgctggttttggtcttagtttggaagatgacgcaatctgttttgaagattggcaatcctcttcttgttatggtgaaggtgatgatggtttcgtcgttaattctcaaggcgtttggcacagtagtagctgttaaggagagattgtggagtctgaaggcgaactgctgataaaaaagaaagttaaagagatggaacaagcacaaagaaagtttcgtaaggaaattgaagaactttgtgaacagtttcaggaacaagcttggataggtgactacggtaacggagaaacttattaccctacaggaacaccagccgcagatcactatattgatttcatttgtgaagattatggtgtagagttggatgaaaatggtttaaccacaagaggtgtttggatctcttcttcctcaatgtgttagtaaataataacccgcttcggcgggttttttattgacaggaatctggaagcttgataaacttaacctatcaaccaatagaggagaaatattatggtgttaattggtagccgtgcattacaaattcatgctatggacatgggaaaagacttgtatcgcccttgtgtagatttagattacctgtgtacagaacaagagtgggaagaattatcaaaaatgttctctcaagatgagtttgttgaacttgtagaacgtaaagggaacaagggccatgtcaaaatgatagctggtgcacatttggaatacgatattgcttctcaaggagatagcacagaagctttgattagttattgtgaagattctgatgatgttcgtcgaacttacgctggacacgttgttgctcctttagatgtgctctaccttcttaaaatgagtcatcgttttaaaaaggatagtcctcacttctttaaaactatgaaagatattcatttcatgcgatcactaggcgcaaagatcccagaaaatcttaagagtgtttacgagttgcgtgagaaagaaacatacacttactctcatccaaacttaaacgtgagaagtaaagatttctttaaaggtgatgaggttccgtatgtttatgatcatgattctatccatgaagcaatcgcggtaatggatgctccggcatataaatcttatatgaaagatggaagtgaagttatgaccagcaaagaaaagttttttgctcaaccaaaacatgtgcgcctgttaggtgtttatgaagaagcgtgtgttttggctttggaacgttcacaaattcctttcggtggagagatcggaggtccaacccctaagcaaagttttataatggctttatctaaagtctgcacatccatcactagtggttggtttagggaatatgcttgggaaaacttttatgttgttattaagctatatgaaaacatgggcgaaaacgactatgttgaacgttttaaagctaatcaacatgtagtaaagccttttgaaggaggttattaatatgtgtggatatctttcagaaagttatttcaaagtgacgcatgaggatttagaaaaagcacgattgaaactgacagctattattgaatactctaatactgttgatcacagattaaagactactaaagtatctgttccttgttggttaggtttacggcataaaataatgtctcaacatgaccatgttgttcgagagatgcatggttggtgttggtttcacgatgtggctctgcattttggttatattacagaagaagagcatagattctgtgaactaacatatcgtattccaacccttcacgatttagatttgtggaagaaagcaaacgagatttttcttacagaaagtgattggcgtaaagttatggcttgtcttgaatggaggggtaatgagtaaaacagttttgtctatgtttgacggatctgggatcatggtgttacgttatgccgaagcaggtcacaagtgtttttgtgtaaacgctgatgaaggggatcacggtaaatacgaggttaggatggagcacccaaacataacctatgtgaatgcctggatagattctacattcaaccctgaagatcatgggatacctaaacccgatattatttttggatttccaccttgcactatgttagcaggtagtggtagcaaacacgaacgcagcacagaggaattggatgaagctttagctaatattcgtgtagtggaagctttgggtaacaaatataatgttccttggatgattgagaacccagtaggtaaactttcaaccttatggcgtaaacccgatttttactttgatccttatgagtatggtgggtatttgtttgaagaggaaggaagctttcatcctaaaatgcctacccgtgatgggtatacaaagaaaacttgtatttggcacggcaatggttttgttcaaccagtgaagaaaccagtagatcatataggctgcttctggggttggaaaagcttaggcggagctagtgcaaaaacaaaacaacttagatccctaaccgcacgtggttttgctcgtgccgtgtttttgtctaacaatcttctagataaggagaaataatgtcaaattcaaaaccagtagttgcttatcaagtagatcgtaatgatggtgaaggtagtgttgtagtttttgatacacatggtcttgcagcaagacgcaaaggtgcttgtctactggacattggtggtgaagatgaatactgcactgtacgtagagtaaaagaatttgatcaatatgctgaaaaaggttttgtacccgtgaaagcactattagaagctggatggtggatacctagtgcacatgattatgatattttggaagatacagatgaattcaacagtgaagattttgttttttctctggatgaaaaatgcgtttggaaggactgggatgaaatggaacgccatgcttattttataaacgaagcattagatcgtaaaacttggtttgagaatacagttaaagcagcgtatcctcaatttacttttacacagttttggggtggcccacatcatattactcatacagcatatttcgagttcccaggctcacgttataaaggtactgtttattgggattgggacgaggacaaagaaccttctgctcaagacttccgttgctatgtttgtcaaggtgatcaagaagcccttgacaaatacctacaaagtctggtatagtgccaacatctgaacaaagcctcctgtttcagggggcttttcttttataggagggaatatgtttcaagtaaatgtcaatgtgcataatagttactctgattgtgaaacgtgtggctataattcatctaatgttgttcgtattagtggcgatttaggagaagcttcttttggagaagaagcaagttgctttagtggtatggatgcagaatggaatgatattgcacattggttggtgagcaaactaaaagaaaaagagaaaccatttcctactctgcttgatcgttctcttgtggaagacgcaggtaaagcatatgcagactatgcgtatgcagacggtaaatatttggaagatgataaggctaaccatttgctttatgtttactatgaagctgaatctgcctacgataattattacagcatgtctaacatcctacgtctgtttgcagagtttgatatttatttcgaagtagaattttcagaagatgatgtttatgaatatgattcttatgatccatttgaggaggaagagggtgaatgatagaacgaaaacccttaccagatagagactacttgttatcaaggtttagtgtggagaatggtcgtcttgtttggaaacctaaaccttctacaacaaaagagaacaaaagatggaatagcagatacgcagggaagattgcagggactattgataaagctggttactctcatgtcaaaatagacggtattgtatacttggagcacagagtttgttttaaaatgtaccataattactgtccagatgttatagatcatgatgacggcaataagcttaataatgcggaaagtaatttattggatagtaactatttattaaataataacaatagacatgtggatgggttagaaggtatttatgaaaaggatggtgtttttctttgggttataaactacaaccaagaaactttctctgtttcaggtttcaaaactaaagaggaagctactgtagctagagctttagcaaaacaagaaattttgaaaggatcttatatcaaaaaagaaaagaagcgtatagataacacttcaggattaagttgtgtgtttgtggcaacaagagagaacattctttttcaagtttgtgtttgacaagaccacgtattgcaaatatggtttcaacgatccagagagatgtgctatagctctggagaagctaaggttgaaggtgatgaaagaaaaatataaacctgcaaataaaagcatttgcgaaaaacataaggaggagatttatgccgcgtagagtcatattcataactggcgcaggactatctgtggatagcggtatcccagcttttagaacagatacttcttcaggggaggcgttatggtcttcttataatctttctgaagtctgtgacattttcaacttccgtgacggttatcagcaagaacaaggtattctggatgctatgggcggtttagatgcggaaggatataacctctaccgtaaaactcacgacttttacaataaacgtcgcgcggaattagagaaagttgacccgaatccggcacatcttcagattggggaatggttcaaaaaacatggtgcagaaaagattattaacatcactactaacgttgatgacctccttgaacgagcaggagtagatagggaagaagtgctacatgtgcatggttttcttcctgaaattacttttcaaagaaaagctggacaacctacaattgtaaaagatgttggttatcaagccatagatgtagatgactaccattatgtaaaacctaatgtaatcttctttggggaagctgctccactttacacagatatgtatcatatttttgatacactgacggctcaagatatggttatcgttgtaggctgctctaaccaagtaatcaacttcaactgggaactcttccctgccctgaatattggggttaagatggttgtagttaacccaggtttgaattttgtagaacaaactctctacgaagaacgtggagtgcttgtctaccgagagaaagcaggaacagtcttcagtgatgaaggctttatcaaaatggttgaagaccatttaaacaaataaaccactcaaggggcttcggcccctttcttattaggagaataaaatgactgaagaaatccgtgattactaccttgcacattacgtttactactttgccaatgctacacaaaaaggggaaggtaatctttacttggcaacaggacatggaacaggcgttaggaaatccaatattgataatgccttggctcaagtggctgcggggctagaagataaacttcaaacacctgtagttgtagtgatgcaaaatataagttacctagcaagttgtactgaaaccgaatttaacgcgtctgagacgcaatctaacgaagaataaaacaaaggcacccaagtgggtgccttttctattttagagcgtctctgttcgatttaggtgggttctagcttacttgtgtagtgctctctcgtataactcaataattaattcatcttctactgtaatacgcgccatttgatccgtcttaaggattgttggttggtagtggtgcatttcactattgatactacaatcccattcgtcataacctaaatactctcctacatggaccttaaccataaagggaaacgggttatctaccaaaaatgccatacaaccttcttcgattttatttaacacacgacctcctattgctacagatatgaaaaaacccgccgaagcgggttctattgctacgataggatcactatcctatagtattgtttctgtgtcaagccttagcgtagaaaaacttctcatattcagattttgttacgattgtggggcaatcttttgttccatcctcgataacaggggcttctaccattctggtgttgaataagcaataagttccacgcatgtaaatacccagttttgtttctacgatgtgctctttacttacgcttgaaaacttaatctcaccatcggagtctcttatagcaataagcgcatgttcgggccaatcttttccttttgctcctaaagcattatacaattcttgaacgagttccatatgacctccttattaaataacaaatttttcttcttctggcttatcataatctggagaataaacatgtgcgggattaaaacctttaaaatttccgcgacctttacgtggacagttgaatgtgcgagcttgatgatccccaaaagatttcccacaatgcatacatttaaaatcagtgcgtttagtcatgccatatctccttttaaaaggctgcacctgttgaagatgcagctttgatagattatttagatgagtctaaaatgtcttttacttttgccgtgataacgtcttgatatttgttaataagatagcctacaactacacctacgataaatgaaaccattatttctccttatttaagtggtgagagaacaatctctcggttttttaagaaccaaagcacgtcatcttgatcatagtctgatccctctgtagtagaatttttgatagaatcaaaaaaccaacgaggtataccaaaacaacttccagatgactgcatgtctttctgcgacattttaaatgtgattggaaaatcacaattatcaatctctcggatatctgctgaagataagattgtaacttcaaccagttcgtcgttagatgtagtatcgttgtcttcctgaataatgtcaaatgctttttgcacatcttttgcatctaatgttaaacctgtggctttctgaaaagccgaaacaaaaattagagcttcttcagagcaaggggcttccagcaaatgagccataataggtgacaagcaaatgttaagatctttgtcataccaacgaacaatccacacaggcgttgctccgttttgtttgtcacgagccaaaattgtaacgtgctgaccttcttctggtatatgatacaaaccagaaaaaccaggacctgtagtagattttttgacacgtgctacgtgtccaacttctaaaggatctttaccatcccaaatcttctcttccatataacctcctaaataacatctttgaaatagtgaatcacttcaatattatggtacaaagtgcttcgctcttttgtgtactctgttttagtaacaaacacttttgcaataccgtacttatgtgctggtaggtttggattggtttgcataatttctttcactacatttatagtttcgtgctcggattcccaataagtgaagtaaccctcactatcaacgattaaagactcgttttcaagatctacaaaacagaaaaatattgacggatggctcattctttttcttcaaccttcctcaaagctttttgatcgaatatggcgtgttgcaattccccgttttcatcgaaccaagttactttacaagattcaccataactttctattactgtcattcgtttgtttgcacctttaaggcaaaccacatcacctacttgcatcatgattgagttcctttttgtttttcaatagctgcacgaatttctgctaaaggttctgctaccaagtcttcaacttcttggatttgttcattcatcacatcacgaaccatttgaatacgctcttcaagggaaacagcaagttcatctgcataagccatattaagaacgtggtagaaattttcttgtgcacttaaagcaccagataacaaataatcctgatcttcctctggtaaaagcatgtgttgctcatattcagcaaaagtgtttttgttaatctcaagcaaagcacccatcataacatcatactgataatttttatgaccaggattgtttaaaataatatcttcaaagatattaagaagaatcttagtaacaaaagcattgttttcggcaccttccatctgacggattaccgtgattacttctttttctttagcgttttggctcatagtgtttctcctctgattctatttcgatatagcctgtggttttgcacgggttacactcgtaaatttgacctacatccgccataacatatccttcaccaccacaataggggcaaggcataggaggacaaggtatggacgtaatgattgttacgacattatcaattttcaacattttcgccattattaccattccgctattaacgtcaaaccaagtgcatcgttaaaacgctcaacatttgagtataggtatggaggggttatttgctctaaaatctgtgctgcttccacttggtgctctatgttttgagaagttcgggcataaactaagacacccattttattcaaaataaaaacagaatcagacccatccagcttatcaacggctgcatacattttagtcatatcttctcctggattaccattcagcaacaagactaggattcatagcaaaagctttgaaagttgttatgtcatgactaacattaaaactaacaccttttactttctctaatatttgaactttcgtctctccgtcccacggtaggatgataacaccatcttctgtgatcaaccaccaatggttctctccatctcgtgaatcttttgctttgtatagaaaattggaactcattcttcctcctgttcggtattattcacctgtgagacacaatgtaacacaagctttgtgagtttgtcaaggatctaattacattctacacaagaagaggggttaataactataggaatagtctcactataggtgcaatactagttaagagttagattgataggtaagacttatcttaaacagataattgataggtgagtcaccattgactttttcaaaaaagtatggtaccctaaacatatgtttacgagcgatagcgagtagtagatttctatataataatgtttcatgttactcacgacagtgaggtatgaaacgtaagttaaggtagataaactatgatcatctatctaccatctattaatcaatatagatctaatgttagactaacagttatccaacaaacaatagcagtccatataacaagtaatgatctacaaactacatcccattcaaatacattgtatgttaaccattctcccatcacaacagaagaacctaaccaacatccaacaataactataatccaataaaagaatcctacagtagagtatacagcaaaagcttttaacatctttcctccaaaagttgttcaacagtttgacgagtatgattgtcccagtaaaccttagtgaagtcaagagttccttgttcgtttctcttagtttcgaagaagtatccgccttctctttctactctgtctctaatgtgctctatgaggtgctttttacaagatgctgataaacagtggtcatattccccacgaagcaatgctatagctgcaagcctgttatcaccaacttgagatattgtccaagaaagcatactaccttttatacctaaaggtgtttgtcgaatggaatatccaccatgcctactgatagaaattatggcaagtggttctcctgttagggatcttcctaatgcaccttctgttggacttccttcaataacacgtttgaaaaaggctttgatcttacctaacataagtcccccttaaaaatttacttgtttaaagtatctcttacttgttctgcttgacgtttagtaataaaagtcccaaccgaaacgttaaactcattgactacagagaacgatccatcacggttctcacgaatattaaacaatttcttactcatttctacctccttcaatgctttgtgccgtaccatcccaagccattagaatgttttccaatagttcacgaggctctttaaaccaaacttccatttcatcaaggatctcgtccgtgtcgtaagtataacctggaacaccaagttcacatttcttaagatagctttctaaccagcggtgataattcttaacccattcatactgtgctaccttttcttttacccaatctacacgatctttatcataatgttgagtgccaaggaaaaaaccattgtggaaactttcctcaccgaaaggataaattggatctaaaccatcttcttcaaataacatttttaatctgtttgatgtagatttcttagtttctgaattgtagtttgtggttataagccaatcttccaaacaacgacacaaaccttgacgagaatcccaaggaaaaacacaatctccgacaggagcttgtttcgcccatttcaaccagcctttaaaaaagttatacagtatgtagtcttcagtgtaatacattatctcctcctttacgtatacaataacaccccgaagaacggggtgcaactgttatttaatctgtttgaaaatttcgtttggaacggtaccgtttaaaataccttctacgatctcttgtgcagatgtgtaagagagtccaaaagaagctacgcctaaaattgcctccttcaaaggatctggcaggggttcaaaattacctgcaacaaagccacctgcacaagcagcgccttcatcatcccagaaaacaactgctacatcgttaccatgcgaagttgtgcgatgtgcaataacttcaacttcggtgccttctttaggaacagaataagaactgtcccaagaatatctttccaagtcaggaacaaagataaccttttcacctactggcggcagttcacaacgataataccaagaatttttttcgttcattgctttattttcctccacgtcttcaaaagtaacgatccaatcgtagccgtaagaaaacggatattttagatctaaagaataagtttgacctagatcgtcctcaacaagaaccatcctgtcaaagtttgcgatgttaggattatgtttaatgacagggtatgtttcccctacagtaaattgtcctaaatggtaaagttcatctctccaagtaatttggacataagtgcattgaatcataaaatcacccccaagaaatatttatatatcttacaatgtttgcactgtctaaagccatgtttgcaccacacccacgctcgcgccagtaactaacaataccttcacagatactctcttgtatcttcttatcacttggcatttctagtataagacttgggttgtggatgtttatgttataatatccttcctctgcggcttgagctaccaatttacttactttttcaaagtacggggaattagtggcatctgctattgtttttaaggtttgtctatccattattctgcctcatcatagaagaaatccaactcttgttccagttgtttaacttgatccttaacccactgtacacgtttttcattaaacatgcaacgtttttccttacactcttgctcaaaagattttgctgtgttaaacgggaaagttgtatctaaaccagcattttcaaaactggctaattgcataccataaacagaatatgctaaagaatgatcggctcgaaattcatcacttatatacatacgtagacctcggcataagccaacatcagcgtaaccactttctcttggaaagagacggaggtgttctaaccaattattatagaaatctaaaagaatcctcttacacttcaaatcgattgtcataaaaagtttctccttcatcgaacaagttggcaagattgttcacggcaatctgggtggaaagaagacaactgtttgcagacacataagcacgagctattttgtaaacataggctttcgtattacaattgtctaggatcggaagactttcgtcgatagcatctataacactaaacatcacatctaaaactttaattgtaagtattgtatctatatcttcgtaacctttttcaatccgacctgaatagaaagcatagtcctcaacagttcgtcgtttaaactggcgcataaaatcggaaccatctgtagtagaattgaacaaattttcaaaaaatacctcccatccggcaaaaagggctgacagcatgattaagtgatctacagattcattttcttgtttcatatcctctcctatttaatgttcaatctagcacacaagcgagaaacagttttagcatcccacttaccaccacgtgctgttgcgattttcttactattgaatttttcagcaatagttttgtaaggtgtatttaaatctctaaggatctccaagcgttcacgaaatgtctctgcaaaagcgtctgctttaacagaattgtattccatttttccttttctacgtgcagcggcagttttaggattagcactgcctaacaaaacacctttgctttttgctacagcaagaccctttttaatacgatcagcaatacctctaacttcttgttcagccagaacagacagaagctgtataaccattttatctgcgtctggcatgatggctatcttaacatcgatcatttctagaagagttgctacggaggcgttgttacgacccaagcggtcaactttagctaccaataaagttgctccggtagctttacacatttcaaccgctttaaccagttccttacgttgcttccaatcgcccttaccagaatagtattcagaaaattgaccaataacttcagcatcaggcacagagtctaagaagtaacggatatcgttctcttggctctccataccatattgtgcctcaccttttttctgtttagaaagacgactgtaaacaacaaactttttcataaccactcctaaaccattgctgtattctcactttacaaaacgaataaacacttgtcaaggtatttattatttacagccattctacttttaagcagtattcttcgacatgttgtttacgcttgtttttgtctatgtaagtgtattcaacaaatgtcccaagataatccttgtccacattgtgttggctattaattggacatttagtacgacaaacccgttgccactgacgaagaattacggctttgtttttaggatcaaagggatgagggtaatgtgccttcattcacgcctcctgttttagtcgaaaaatattttgaataacgagagatgtatagttatcacttagtcccataagttctacttccaagtttcgaatatcttccaccgtaggaggatatgttggtaaaaatgcttgagcattgccagatccaacctcattgctgtaagcagttgtaaaattgtaagatacaaaacatgaaacacctttttgtcggtacccgattaatcgacgaatacaccagataagagccaaacctatgagaacacctcctaaaccagctaacaagaaggataagttcataatagcttcgttaacaactgcttgcattcttttctccttagttatgtaaacccaaatgtgctacaacttctctacgataagataactgcatagcgattttatagccaggatgaaaaccatttacatcaatgtcatcaaaccaaacctcaaacgaaccgtgcttaagagtcattaagttgatataccattcgataatataatgatcgtcagcaataccttcgatgtaaaattctcggcaacagtgagataggtcttcacttgtttcacgtttccagtctttgatagcacccttctctttggctttattcagaatcttgatcaggtcttcaacttgcatgtttctctccttttgtggttaatctttatattttaaatattgtaccgtcttctgtcaaatagcctctttctctaaaacaactctttggatcacaacatcttcaatgtttgccaaacaatgacccaaagtcaatcctgccttgaaaggtgcttgtagtttggattcggcttctacgcgaacagaatgttccgctccgcacatggtgtaatctacacggtaaacatttaaacctaagaacatagattcttcttcttcacaacaaggattgagttcagcccattcccaagcatctccttctaaagcaaatggagtgttgtaattgaagaaagtgcagcgcggatattccccgttgaaagaatctttcaacaggatatatttcttaccatttgcatggaagagttctcctttgataaccttacctacaaggatatcactgttagtggaacgggtgcaaataaattttttcatgattttctcctctctgtttcgatgagatgattatgacaaagacagatccttctgtcaaccaattatttcttctgctacacgttcttttacccagttcacacgatccacattcaaatgacaacggcttttttccgcttctaaggtgtactttccaaaattactgttgaaaggcaacaccataaccaaacctttgaggtagaactgctcatgcatttcatccagtacaggttcgtatcgttcgctttctcctatgtcgtaaaaatcatagaggttcgtgcacaaacctgtgcaacgggtgaacggttcaccttcaggagcaccagcttccaaccatgccaaatacgtgcggtaaaatgttaatagttcttcgctcatttccactctccttcgtgatagtaaacctcaaaagaatagtaagtgaacatgctcattgtaacacctgccatttctggatcaaagggggtgttgttatacatgtcaactactgcctgacccgctgctttggcatgtgctgctgaatcacaggcacaaacatctttctcccacggaaacttgccatcatacttaagacggacaatccacatgcttattcctccatctcaaaccattcagggaacactttatggaagacacgggttgtttccaaaaggaattccaattctttttccagatctgcgttccaatcgtgcactttaacattgattgccaatgcacttgcacggcgacttaattcttgacagattggatcacgcagaactattgagtcgtaaaactgacaaacagcttcaagttcataccagttataatccgacattattcatcctcctctgcaatacgatctcttacccaattaattctgtccacgttcaggtgacaggcatctgcatctgactctaagacatatgcatcgtagttctcattgaaagggagttcttgattcaacactttatggtaaaactgtgcgtgcatttcatctgacaaggttgttataatggggttgtaattacctctgtgcacataatcgaacaagttggcacacaaaccacaatcccgccgaaaaggtttaccatcaggagcaccaacatcaatccatgctagataaattttataaaactccatcaaccttgcgcttgttttcatttagccacctcgttagtttttcttgctctttgtttgcgcgttctaagcttctgaactttaaacagagggaacgagaatccctacccatgcacaagctttcatctaagctgtgctccccaaccaaccaaagagagtatgtttgaacatctaacccatagtttctgtctttccataatctcaccccaagaacatcaaaaggagcttccgcgactaaagaaaggaaccgatctttattcatattacaccaccttactcacgttgataatgtatgtataccatacataaaataaatgtcaaggcttatcgacacagatagttgtaacgatctgctttatcctctgcttcagcaaagtcagcaatcaaggaagttttaagttcttccaactctttcacccaagagtcgtaatcgttctgtgtttctccaatagtttggagaaaacaatcgtcgtagccaatagacatggctaactcgataatacgttccagtttttcttccatcacttctctccttctacagacttctgtttaacatagaagtaagcaccacgagcaagatacaaatcatgttcaatatcgctcacaggaaaaccatttggatttttaaaaccatcttctacagccaaaatgagagatcgtaaactgatagctaacaactccatttgatcttgtagttttctattttctgcgtaaaggtttttgcatttttgttctgcatttttccattgttctaatgcatgatcatagcggtgcataagaatagctttttcttgttcacgcttaaaagtttcttcacaaatgaaacctgtgcctaaaccagtttcttcgtctttgacaaacacttcaacaaaatctttagacatattatctcctatttgctttcggatactcccaaccctctgggagatcttctttacacatccactcaaaaggccagcgacaataactgtgccactttccatcgagatacaaacaatcttcatctactggtccacaagggttgataactacaacacaccctttcgctcgccaatattgaactatttcagggtaaaaacaagaaacgtcggtccactcccaaatacgttcatcattcagacggtaggctgctggtaatgtttctttcatagtattaaacctgagccaaggagtcacgccaattacggctatctccttctcctaaataccagtaatccgcagcattaaaaacttgataaggaatacgccacgcataagcgaaatctggaatctccggtttatgactgtaaccataacgctcgccactcgaatctgttgcaatataattaacaaattcaggaacctctaaaatttcaccttgatactctacacgcttgaagccatcttccacttgttcctcccccttctaccagaagggcaagaagtttgatgtgagggcaagtgaaatcttgtcctggataacgtgaacggatatcagttaacaatgcgatcacagcatccgataactctttataatcctcatatcttacaaatgtgccttctgtcggatcatcaggacacaaacgccaaacatcgttgcagtttacagcataatgtcgcactttagtcataaataccccttatcgttgcgtacaatcagcttctagagtaagaacattcgttattgttttatcattttttagaaatgcaaaccaagccaaagtgtctcgatactctgtgcgcatcattactacttcagtagtgccaataaattgttgtgaaccgtacatagcactaccatctttacttttttctcctgtgtattgcagaatgccactcatcaaagcaccgcctgaatttttaaggataaaggagttatctttattaatgacaacagaagccattttcttaggaccagaaatcacttcacctttcagatttttaacaaccacatctgacacacactcataaacttgagacgcacttgctgttccaagtgatgcaatgagtaacaacaaacctacgatgatctttttcatataaactctcctctttgtttacccgatgcgccccctgttgggcggaaagggttgtacgcaaaatttttagctccaatcgtcgggtgtcccgactccttacgcttttaatgttttaacagaatgacaagctttgcaaacaataaccggaacaagttcatctccattatccgcataaatcactgttttcttcattctgccaccacatgaacaatactctgtatgatccgctggaatattaaatattccgtaatcactttcatactgtttcttacatatggacactgctttcgtaaaacaagacatgcctactccgcaagaaccttcacttcgtcagagaagaatacgtaatcacaaccttcccaaacatcttcttcaaaccactcccatccctcgactttggacatttcttctatcgtaacaaagaatgttgtcatatcctcactaacaagatgtgcttcaacaacaaaaggaatctgaacattctcaaaaccaacataacccaatacatcacaaactctaattttcatattatgctcctctgtagattatgttggtgcgttcacactctgctaccagcaagcgattagcaatgttatccataggaacatcaatctctacactccaggcattgatacacacttcttcaatctttgctcccaacgtttgtgcgatcagagcaacagccccagcatattcaagtttaatctcaattaccattttgcacctcaaggttatttgtcttgcttgtatcttacaaggcgatcacactccaggtcaagaaatttctccgcatttcgttcatgtttgagcacaatacattgttctttccagtctgtagctctttgctgcgctgctcctgggtcaaaatcccaaagccatgccgcgaaaagaacaactacccaaagccataccgcgaaaagaacaactataacaattactaagaaactaaacactattggcattgcacatcctcctgtgtagcatgatcttttacccattttatacgggcagcattcaaatgcaatagcccgtttctttgtgcaaaatcatatttaaaccagtctccgtcatcaaacgggtattcttcagacaaccctgcttctcgaaattgcatttgcatttcataatttagatcatcgtaaccaccagtccaaaggtagaggcaactgcacaaacctttatcgtgccagaaaggattattatctggagcaccagctaacagccaattatgataggcttgataaaattctttaagttcttctgacatttaaccccctgtgtacagtgttgaaagatacacagcaaaagcattctcggctgttttaacctcctcttcaagatcttcacgctctgttggcgttagcgcatttcgcacagcagcgtctgcttctcggatttttcttactaaacgtgaaacatctttcagttgttgaaaagtagccataatcttcctccttttagtcaaaccagttgtattcggaagggtaacgagcgtagtttggcttgtaccccagtcttttcatcttaacagacatacgagtgaagccaaaggttgttttgcccttagacataaacttcttcccactcttcattggcttcttagggtttttgatcgtctggtgtaacgctcgcgcaagccacagagtgtatgcgctcggcacttgattaactttcatcttgttacctttcatcgaaacctccttagtgaacttcgtgccaagtgccaaactcttctgctgatactttaggaacggcatgagtttctcgatatttgtttaaagctttctcaatggctgtagcaaaaacatcttgtgatttataaggcatataataagagcgtcccatgtatgccactgcatcacgtaattcttctgcttgctcttgtgtaactgtcaatgtgatagtaaccattatttcacctccgaccaatcaatagtgatccactcgtatgccccgttcagatccatttctttataaacaataagcccacgctcacgaagaattgctactgcttcatccatccacttcacctgattgtagatcgcccctgggtgggtaggggaattatctagaccaaaatcagatggcgtgaaatttcttgaagagtttcccgctcgtgcttcagcaaaacatgtctcgatcacttcttcaacagggaagttgaaggaagcttcttttgcaatacggcgtaactgttcagtcagattcatcttattctcctttcgttgtgtgaaacattacagcagatctaatgctttcaactcttctttcaatgattcaggcaggtcacattcaatgtcaatcagagataacaagtgaccaacaatgccttccagatgttgatactcactataacttataaattcagaattgtaaacagaaacatccttagtttctttcacaacttcccccgcagacacacacataaaaaagttacgctctccgcgagctaacaatatctcccaactcctgaacggatactgtccagcttcaataatatctccgctgtccaataaagtcaatgagcaaacagaccctgattcactaacatcttcgacgcggaaacaagacccttcaatcaaagctgccattttgaaattttcatcagaaatcatagagaaagcttcacatgcagctttgcttttgaaacagtaaacagcattaactttgaacataatagctccttattttattaccgcagtaggctcaatactaacaacaccaatacgctcatagatctcaacagtagaaattggatattcttccttcatcttttttgcttccgtggcgatctcttcataagaatgtgacaccaattggacattcatgcctttaacaatagcatagtgtttaaaattcgctgcggattcctcttgtttaggctcaacaacatctttaatatttttaaaataagggttatcgcttttgattagcagtgcacaagcttccttgaaccagccttcacctgctacatgatttgtattacatacaagcctacggattgctgttacatcttgtccaaccatctttgtgatcacgaaaggatcatcgccaataagatcggaaatttttcggtttacattgtttgtcgtttgtcctccgtcaatataattggcgaaaagcttacgatcttgttcacttgcaaacttatagacaccaccttctacaaagacacagcctcctgtaggagaatcttcataatcttcaggagtatgttcttcaaaacgagcataatccatacaacttacaagcttataaccttcagggaaaagcccagaaccagcttcgatgattttatttgtgtctaataccttcaccttagatacagaaccaagaaaatcaacatccaaaactttaaacttgctatcttgaatgcaacctacaaagaaagcgttaccaatactagctttaccaaaattctttttggtatcttccgatttgaaattataaataaaacctactttaaacataacattccccttttaaacaaaagatacgccgatggtagcaacaaccatacgtttataaacttcaacctcttctgtaggattagccattttatgctctgctgcttctttcaaagcttcttcataactttcaaatccagaaatacaggtgtcatcagtcattacaacataccactcttcttttgttgtatcaacaggttcttcttggggttttccacgaccaccacgaacaccaccgtcaacaaaataatctatatgagcagaattgattatgtaacgatccccatcactagcagtgataataccgtctctccctatcacaacaattgacaagatattaccatttgcatcagtgctcaacacctcgaaaaaattctctccaatgatagcagcaatactgttatcaaaggtagaatataatcgcatatagtcttcatcctggaaacggtagacatgaccttctttaaacattgctctctcctcctagttcatcataccatttcaaagcgtcttttggaagcataccaaaatcttcttttagttctttttcaatctcttcttgcatttccatcagcattttcaattgacgaacttttttgtgcatagccacatttctttcattaagatttgtcactacattatttgcacgacttggtggaaatgacaaaggtttcacgggaagataatcttcaatattatctagtgcgttacgaaaattatgatccaagaaacgcacatctacacgattgtaatcggcagctacaacagtgaacactttaaacggcacattggataaagtatgttgcacacagacagtacccatattaccttcaattttactggtaacttccagcaaacctgtatgagcactaacataatcgtgaacacattgcacataagctgccagtatagtgaattgtctcattttctacctccccataatgctaacattttattgaaaatggaaacgcgtcgtgcgcgagatgccatatcataattcattctttccgtctctgcaagaaattgatctacggtaatcaacgcttctgtcttctctttcagagtttgcatattcatccattcacattcagagtaccaattatcgaaatacaaactatcaagaagatccattgctgcttcattctgttgtggtgtgatcattgcacacaacccttaatagacaatttcatattcgtgaggaaagaaaacataatcttccccttctcgtgcatctatctcgtcccaaaaccattcctgcacttccatcatcttcgagaatcgcacatgagcaagcccactgtattccacagtagcttccaacacaagtggaaattttgcatggacaagtcctttataaccaccatcattctcaatacgaattttcatgcgtttcatgttatgcatccttcagacccttaataaagtaacgaccaaccggattccctcggaagtattcgttaatgaaatcgataacacacgtttcactgcctgtcacaacggacggcttaaagttttggaattctacagctacacggctggctttagccagtgcttgcacacgtgtaggatcagtcaagaacattgtgacagttttcaaattcttcatttcatctcctcattggctatctgttatgtcgtccattatacaaacatctttattcaatgcaagcattatttgcatcttcaatgcgatctttcacccactgaagacgtaactcgttggtatgacacgctaaacctatgcactctgaaaggtaatccatgcaatctgcattaaacgggaaattgtaatctagtcctgcaccaataaactgggatttcatctcttgttgtagacgaggtaacagttcatcagggtatgttccctctacatacttaatcaaacatatgcacaaaccactcgttgtgtgaccttctacctcaccagcaagccaagctttgtaaaacttcattagacgtaaactacttaacggaacatttttactctcttgcatgacaatctcctctcatcgttagccatctttcatggcaatcatcaatcaccaacatcatacgatcaatcttaaggaattacaatcgaattatcataggggattcctatcaattatcccatatataccgattatttttgacaccccattcttgtataaaaagtaacccaaaatatccacggggagagattatttcgacacaccctgtttcatggcaatcatggcaagaatatctaatagaatcaatatcatatggcaaaaatcatggcgcatacgtaagaagtgcttaacgcgaattttcgggccgtcaggtccacgcagcgacaattcccaaatatcatgcgaatgagaataattatcattcgtattcaatgacttatgcaaggctcatgccaacatagcgacaaggtgggccacctgattataaatcacacaaacacttatttatcaatggtttggcaacttcatcatatgacggaacaatgtcaactaatcccgctcatgacagacggactattatttatatgagaatgattattatttaaacgtttattaacatataaactaaaataaatcaagaattttctgattttatttacgtttaagagaaggtgctcaacatcctaccggatcgccgttggcaatcctcggatatttacgcccccatgattaaggtttatctcttttatagctcaacattcccgcctgtggcggtaacatttcgcccccaaaattattgacttttattctattatgtgcatagtgtgcaatgtatcggaatgatgataatcatcctcccattgcccccataattattgccatgctaattgtttcattacgtaattattacaatgactattgttattgcgctaatgttatgatcttggtaattacatataatgctaataataagccagcgcaataagtgtaagcgtcattacgcttgcaattattgcaagctacgcagtaacaagaaataaccatcaccgatggttatgattgttggggtgtagttggcttattattagctcgctatgtgtccggcatagcgtgctaatgatgactctgtgaatgattcgttttgtaatgatttcattcaggcactattttgctaatagttattattttaatggtttcgtttgttattgttcgttagttggttgttttgtcgtgttatcgttattttgcttagtatttatcatggtttgattgtttgtcgttatcaatcatcttgctattattcctttgattatgattagtttgcttattgttttatgttgtttgttggttagttgttgcgaactattatcaacattataattatgcgcttatattgcatagataatcatgggtagatgataatggttatcattgcactagaaaggaggtaaaagggtgtttttgatggtttgttgttggttgttgatcgattttaaccgctctaaatagctctctaacagcctgttgccctgggatgtatggttattcgtttaatggtcgattagctcgataccgtgatttattcagttttgttctgtgtcggtttttcataggcgaaagctatcaacattgttcgggcaaaaagaaagggcgctttgtgcgccctggtatgaaatgttatttactgataagctggatcgtttgttatatcaatccaatgagataaattaattttattttttgctttcattttctcgatcaaacgttcggctaatgtctcggaacgaatataaacgttttcgctaaaatcttgccccgtttcttcgtcgatcatctcacgatattcgatttttccgataaacgcgtgattcagcgcataagttttacccgtgtaccagttatgcaaatggatctcacatttataatcatcgctatacccttcggttgttctaacttcaaccaggtcgcctttaaacactgataagcaccacataggatcacggtctacagcgccgttaaagtctttaccgtttacagtcgctgccaggttgatgatattgctcatggtgattcctcgtttaccgtttaaaatgatttgccctacgtgataaataataatgcaagcgtgatccggtgtcaataggtaaaattgtaaagatttgatagtttgttcctttgatgttttgttgtttgataggcgttagttatcaatatatagcggggtcttccggtgattatcttcccctgctcccaggtgccgcccgttcaataagtataacaaaaaataggactattgcaagccctatttattatcttaaaaccaggtgccaaccgtttccaataggtcactgactacaaggacaacactgatcagcacatgttcaaccatgaaagggataagcgccagcgttgctactacgatccccattgtgatgattacctttctcattgttggcggtttacgtaagctttaccgtttacggtcatcggtatggcctcaaggtctggatcttccttaaggtcgcgtgcaagctcaccgcagcggataccctcgaatccgtagtactctgttgtgccgtcctggaaagttttagcggcaaggcataggcgataattaacgccgatccggtttattgcgttgatatcggttagcgtgatggattctggcaactcattagccagtacaggcgcgttaataccaacaaccagggcaactactgcgatcatctttttcatgcgtctatcctcttcctattgcgtttaatggggcgttaccgccccgcttatggtttattgattgatgttatgatgaaagttattttcttcaatagcttttaaaataaaagccgtgatcgctttcgtgtctacttgttcgaacgtatcagaataagcccaataataatcatcccctactttcggcgggtaaacctggacaaggagatcgccacctggttgatctataagctcaacatgtaagccggatgattcagcggttttaacggcgtttaatactgttgcaatactcataatcttttcctttctgatgtggggcgttgccgcccctttgttgattagatcgctgtttccagtagttcggctaacgtcttaccgcctgatagttggtctaacgtttgctcttctggcaagaaattagctgatattaatccgacttgatttcctttgtgccaattagcttgacggatgattccatcctttaaagattttaccgccattgtgcaaccgtcgccaaatgattcatttttatgatccattacttcataagcgcccagcttgctgctgttaggcaccattaacgcgaatacatcaccaacaaccagcttttctacggtaacaatagcgatagtttccattttactttcctcattatcggcggcaccattgccgccctacgcattaaatataagttatctaagagattagatcaaggattattttgtaaagattacagcttcatcaaaattttcaacatagtaagcaagctcttcatttgctgcaaccattcctaaaagttggctataagataaacctttgatcccttcctcgttgtttaatgcttcgatgatttcatcaacgggcgcaaaaaacatgttattcgattccaggtaggagatggttttcataatgtttacctttttcggggagcggcaccattgccgccctacgtggtaaatattagcacactggcgatctgtgtcaatactttttattcaatataaatcaaattatcttcaccaatgtaagccgacacgttcggcataaacttagctgcattggttaggcggttcgccgtgttagtggtgtatatttcagggcgatcccaaaagcctacgccgtgaccgttacgggtaaaatgtaaatcattcccgatctggttggctgttgcgccgtcgctcattgcctcagagatagcggcaagattagcattaataaaggctgttacatcctgggcgatccgttgatgggcttgatctgaaaaatcataatcagtcatgtcatctataaaattaccttcatgatcccttgcggattcagcaaaaataaaggcttctttataaccgttgatgatttcaataatgatttctgttttcatgctgtacgctcgacaataataatagtttgcgggatctcgttttctactactaacaaggcttttttctgtgtgatagatattttaacacgttgtaaagtagcggtgaaatctttcatttcattatgcgcggacttcgtgcaatgccagatctcaggcttaccaacttgtaagccgcgtaaaaattccgttttgcctgttttgttcgtgatcatttgtttcaccttaaccgataccgtgggaagataggatcatgttagccatagttgcaaccactccaaccgataacgccaggcccactattacaaccgtgaaaattttctctaacatgattctaccctcattaatgggcgttgcaccattgccccgccctacgtaatacactttaccagataacaaattattgtcaaggtttattttacttcccaaacggaaaattcactgcgtggcgggaagtattccccgccttattaattactcttcatcgtcgccgttatagtattcaatgccgttttcatcggttacggtgatgttaacgccaccgatagcaacacgatcacgggcaaacgtcatagcttcatttaaatcttcagaccaaaaaatattgtgacctttgcgcgatacataaaacatagtcgggatcatgatttgtttctcttctgttgtgagcggtggaccattccgccgccctatgtggtaaactttactacgttgtttgcctgttgtcaaattattttttaatgttttgccctacaaaattgatcacttccttaagctgtctctctgtcatgatcgtacctggtaactcttctttaatttcttccggtaaatagatattaccgcgccaggttaacaaacaaccgttttgatcttcgcagatagaataagaaaacatccactcgcaatcattttcaagctcccaaaaacacaaaaagtcttctttccctaagttttcaacggttaaacataatccgcgacgtgctgcataattagtcaggctttttgtgattttcatgatttttctctcttcttgtgagcggcaccattgccgccctacaagatacatattatcagactaggcggacttgtcaaactattttttctttttctttgcttccaaccgtctaaggttacggcttgacttatttcgcaaggcgcttagatcgtcgtaccctttccatgcttgcatatctttcggattcatgttatccccttacttgttagccggatcatataccaggaccgcgccgcttgctttcacgctttccgcttcatagttgcgcagatcgttttctgtaaggttgagcgcgatcacttcctcgatctcaacgtcagcggcaagggcgatctctttgataatgtctgttgttttcatagtacgcaccttataagatgattgataagatagtgataacgaaagcgattatactgatggcaaatgtcatctttttaccttcggatactgccggattttctaccgtgtattctactgtgtacttgctcatcgtgtaatcctctcgtttgctttgggaactattcccgccgccttatgaattaaatatacactatctcaaaatgattgcaagcctttttctaaattatttatgcagtaaacaaaccatcatttacaacggcggcgatgatctcccgtgccattgattcagggaaaggggcgctatagtcctggcttgtctcatcggtatcagtgatccaatgataagctaacgagtaaaagcctttactaactgttttcagtgagatgatgatcactcggtcaagcttattggtgaatgttgccgttaatgtgttaccctcctgcgtcatgttggacaagtaagcgggatcattaatcagggaaaacattagcacggtgttagctttactcatgattgcatcctcaaaggggcgcggcaccattgccgccctacacgataactataacacaatgtaaaacaggatcaacctttatttttccacggtgtcagcttgttaatcattggtgataaatagcgtttaccaacgtaaaacagtacgccaactgatgcaacggcggcgatctcatgtaaggaggaaggtcgcgcggtgtcataataggtaccaataatagcaatagcggctactgcggcaatgtctgtaataattttttcttgttttgcggtgatcataatatttacctttttgtatggtgggggaactattccccgcctgatgtaatacagtttaacaggtccggttatggtgtcaaccacttttaaagatattttatattgataacgttttcaggtttaaccttgttgtgatgtgcatcaacatagatcaaaccatcgtcagaaaagcccaggatcacgccctgcgcaataaaaccgtattcgtcacggtaacgcacggctatttttaacgttgcgttgtaggctgttttaagctcgtttaaagtcatttttgtttatcctctacatgtaaaaagaaagggcgcttggtgcgcccttgttatgttaatcctctaaatccatccaattatatttgtcactcttcccgcgctttgttttattacgcttgtcgccttttcggatcacttcctcgttccaggccttgcggatcttggaagattgaattttttctgcgcgattagatgtattcattttgtttcctctttatatgagcggcaccattgccgctatattattaatttaaactgttttgtaaaattgtcaaggtttatcattgataagagcaagcaaggatcacgcctgcaatataaagccaataattttccctttctcgttggattttatcatcgctgctattctctttaatgtatccccaggatgttaacaggcgatcaatttcccaatattcgaaagcgatattgatatctgatggcaagccttgtaaccatgatgcaagtgctttaacaatactataattaaaacgtgattggttatcagggtaccagtactcggaattaaaacggtgcatcaattccgcgatcttctctttttcggttgtaataccgtaatcattaaaatcgatagcggcaaggatgtactctttaattgcattttgtgctttcatggtctttctctctttttgagcgggaactattcccgccctacgtgtaacagtttactaaaaattaaatccgtgtcaagctttattttgttactaccatttggtaccctgtttcaatgttagtaaatactgttatcccgtcctggcgttcactcattagcatacaaggcgctaacatcctttctactgccttgcactcattgtaaacggcggttatgtctcctgcggccttgtcttctgtggtgaatgtatcgtttacgtaaacctgaccagcgacaacggcgacaatagcgaaagtgatcatgatgtttccttgttagtagtggtttctcttctctatagcgcccattgtaaggcgctataacgaaaagtcaacgattattttttaaggcttaaagtacctaacttgtcagcatgacgcagaccagggaagatccatttgcctgattcatctttcaccggggctttaagcgtagcgcccaggttggcggcgttaactttacgtgcaacgttgcgagcggcttcacgggtagcgaaagtgatcatgatattttcctcttctctttgttaggcggtggaccattccgccgccttgatgtaatacagtttactttatttttgcagtattgcaagcggttttatgaaataatcgtcaaagtaaaattgtaatcacctgattgatacaatactttatcaccgaacgttccaacacgtttaacattgcaatatatacccataacactttttacatctttgatattcttcacgcctgtaatatctttattaaaatgatcgtgatcagaaaataaaacttgttttgcatttttcaacaaggtgcggatattagccatcgtgataatctctcttctgttgtgagcggcactattgccgccctacgtaatacagtttactctttttctttcccgtgtcaacaatctttttcagattaattcatccaggcataacaggcgatcaacgttgagatcggttaggctgatggttggcacctggtaggattcgatgtactcgacgctcgcatattctccaaaattagcaatagcccacttattcaagatctcacatacatcattaatctttttgtttgttacaactgctacaacctgggaactgccaacggtgccggatacacgaacaatattgatagccataatctttaatctctctgttgttggcgggaaaccatttcccgccctatgtgatacatcttacactaattttaaacgttgtcaactgttttttattacattccaaccatcgcggcacggatcgcagtagtgctatatttgaaaccgtctggagttttatcttgtccagtttgttccagaaaaagcatcatatcccgcgccgcatcattacgattagcattagcgttaataaaatccaaggccaaccgatacaatgattcatcgttattaatccaaaggcttacattccaatgagttttgtttttgtgaccgttgtacattttagatttagccatgatttttctctctttttcagtgaggcgggaagtgttcccgctctctatgtaatacagtttactctttttattcgtgctgtcaatgctttttataaatcttttttacgttttacatcgcttgcatgactgtatacagtgatcccattgtcacggcaaaaacgggaaagatacgcgccgcgtgaaaattccttgccctcaaggttgataaccttgctaaattcttccagggcgacggtatcaaaatgatcaccatagccatattgaaacggaacgttaaccacctcgatcagtttaccgccgatctcaacgtcaaccagtaaagaaaaatatgtgttaccgtaggactgttgaaaccagcgacgggcactaatatgcaccgcctcaatgctggataattcaattttagccgtgttagccagggtagcataagcggaaacattgatattaatagccatggtgtcactctctctttttggttagtgggaagtattcccgataaaagttattatgcttatactatcactcattgtcaatagtataagactaaaacttttaacgataatcattataggctttattgacctggcgaatgtaacattcgaaagcaagatcaatgtattcgtattcacgcacataatcaccataggtcactacatacatttttaaagtttcctcataagccaggaggatcgaatctaaacctataatctcagtttttgcaatgatagccatgatgttaaccttttattgttggcggcaccattgccgccctacgtgataaactataccagaagtttaaacagtgtcaaccgtttttattcgtaaattttaccgctttcggcccataccataacgcggcgcatactatcccaagtgttttgatccaggtttaagccgtgcaactcttcggtacttcccagaccaggtaccgctttgttgtaagtcgcatataagcgcccttgatactcatacgccagagtaagatccgtttgaatcatctttttaagcatagcattaagcatcatattagcggcatgttgatcacgttttagcggtaacatgtcaataagggcgcgataagctgaaacatgaatatcaaccgtttcacgtggtaaatttttcatatcatcgcggaaggacaccaggtttaacatgatagtattgatttgcttgctcattgtgttacccttttttgttttggcggggaagtattccgccgccctatgtgatacatcttatcagattaaaaaacgttgtcaagaatatttttagaaaataatagccgctactacaatccaaaatggaacggctagaatgatagcgttaatcgttccaaccgtcaagctattttctttattaatcattgtaagcctcttgcataatttcactatgagcggcaccattgccgccctacgtggtaaatattatgccagtggcggcgatatgtcaaagactattttcaaagttttctagtgcgatccttttttcttcctctgtcggctgataatcaggaaaagcatcaacacacaacaacggcgggatctcttcgtactcttcctcttccgttgtctcctcgtcttcctcctgggctatggctgcaattttggctaattttctttcagcttgaatcaatttaccatcaagtacgttttttgccatgttgtaagcggtccaggtgatgcgcttactttccagtgcttgatcaagcgccgctatcttgctggggtattcatccaggacacgaaaagccggatcaactttgtacaaaggattatctttcgcgccgtcgctcgcatcttccgcactggataaatcagcgttaccatttgccagccagccagggcgcacataacgcgcttttacgttgccgttactacgtgctaatctgttacctatttgctcaccactatatcccgtggattcatcgataagatgatcgggaatgatgcgcggatcatctgcttcatgttttacccaagactggatcacatattcgcggcccatattaaccaccttttttcaacaattggcatactttaaaaagacttgctgaatccttgcaagggtagaaagatgtacgataatcacgtacgccaaccttgcggatctcgatgttctcgcatgttgtttgatcaaagatatttatttcatcacgcccccttatataaacatagtggggatgtattaacgcatattttgctaatctgtaaaaagcgttatctttgaacgcgatcacgtgaccttttaatttgatgtaaaacattctaccaccttacaaatagcgggaactattcccgctttatgtaacatattaacaaattattcgttaatgtcaaaccttaaagcaaaaacgctacatcttgcgcttttagtgtagtatcaaccattttcgggcttttataatcaacaaagcgcgcggttttttcaatagcgaaaccgagataatcttgtttattgaatttacattctttcttaaatgtttcccgcgccacggtgatcgctgcgtccagggataaacgcccgtcaatgttgatatttgcgaaagatccgccaccgctcataggtttaccagtggtgccagctacgatcattgttgcgctatatgatgccatgattataatctctcttctgttgtgagcggctggaccattccgccgccctatgtgatacatcttatcaggttgttgtttgttgtcaatactttttattctattcctgcaatttgattaacgcgcttgcattttgtagcgtgctggtcttctgtaatgactcccatttctaacagggaatcaatgaaagataaaaccgtttcatgatcatcctggggatgactgaactcagtaaaaccgtttaccacgacgctgatttgtcctgctttcgctactatgtgcaatgttgccatgattttaactccaaataatgagcggcaccattgccgccctacgtggtaaatattatgccgccacctggcgaacgtcaatcactttttcaatcttttttattttctttttgcttgctatatataaaagaaagggctatcatctttctaccgcgccaaccagggcgcacatcaaagaaagggcgataccatgacaaatactacattacaccttatgcactcattgggctggcaaggcggcacggtgcaccaggtagcaagcgcaacgggcttaaaggttgaaacagttctcaacctgggcgatcataaggtggaagaaatagatcattttgatacgttcgcaaatggttatctatgggcttgcagtggcggcggggaaagcaagataccaccaggggcgcggggcgatatgtatttttggttaggtgtcctatcctggcaagaaaacaaaaaataatcttgacaagcccagggatcgggcttatactgttttacatacagaagaggaagcgccaccccacggcgtaaaggcggggctaacataccagggggggcactggttggaaggttgatcgccggtaggctgggcgctatatatttgtaaagaaatgtaaagataaaataatcgcttgctttcctggctggatctgttattcttattacatggcgaggggacacgggagcgcgagacaaacaccgcccctgcgcgtcattctctaaatgagaatgattatcatttaccttatcaaataagaatcaatctcatttataaacctaaatgcgaatcattatcatttgcatttccatatgagaactcttctcattcccatctgcataaatttttgtaaactttaaattttgcttttgtactttcatttttgtaaaagcaaaaaaactttaaatactgtgggcgcgcaaaatttttaaaattttccttgacttttgagttttgttttgtatctaacattttaagataattttcctaaactttaaattttggttttcaactttcacttttgtaaattcttaaaaagtttaaataatttgagggatttttgagataataggtagtgggaatttgagataacctttaatcttattagtagaccttcaggaacccactcagatcgaatcctagtgatgcaaactgaaaaagacaagggtttgtataggacaaaataacaggctctctacggtgctgtaggagccttatttctgtgctacaaagtgacacctttgttctaaaaatgaaaaaagttaaaatatcacaaatatcgtctttgcggtattttgtctgggaaaagtatttcgatcagtttgttatgatatttacctaaaagattttgccctttccagttgaccggatttagcacccctggttcatacattcccattccaataccgtaaaccttatcgtaaggacttgcttcaacaaacgttttgtattggtaaaggtgtaagtctgcatacaaatctggattctgtacatatttcaagcataaacctcgcataacaatacgctcacggttctcttcccatacgttgttatcaaaatccgacactgccctacccatacgtttgtaataagcttgaatcttctcatctttccgtatcaaactatgagtcagaatagcctgtgcagtgttgtgatcattaaaaagcaaagctttacgccacattatgtattgttcgacacaattaaatgtctgattgtaacctggttcggtttctgtaaagggtgcaatataccaattactaaaaacatctttatgtgaaaagaagaatacataatcatcagttattcgcatttttcatactctccaaaatttcacgttgcccttgctgataggctttcatcagaactactttaaggtttgtctccaagaggtcttcattgtaattataccgctccacaacatatgtcaattcatcataaagatgaagaacggggtagaatacagggttatctgctaaacgtgccatagtttctcctttgttaatccatccaccagtagccataaactgcgtctgcgtcgatgagtttgtgtttgttgttccgcatgtagtctaagataagtagacgtttattgtatctggagagattatgaccctcttttccgccatagtcaaaatattttgcaagatctttacactcaaacaaaatcagttcgggagtttcttcacactggtctgtctggtacacttgacgaatgatcatgtatacatcgtcgtcttccgctaaatgctctactggtccacatccagcaggaacaaattcatagtcccatctgatcagatgtttctctactgcttcaaagaagtccattctttcgttgcgcataatttgaacgtcaactaacatgtttcctcctgtaatgttccaccataaagtttataaatgttttgtattgatgccatgcaagataactccgctgtctctgtgtagccatctggcatagcatatttgctcactgcttccgtgtgaaggacacgcttacaacgcttttctgcatctttgcattgcttcacagtagggaagtgccacacttggccctgtttcatagtaaacacattacgactattttgttctttgatacggcgattactattattagcaataccaaacttcagtgcacagataatatcttgctcatcgtaaatataattaatgtaggcttgttgttgatttttgttagcacactgcggacaaccttgtcctatgtttaaaaggttgtttgcagttcctttttgttccccatgactcttacatacgtatttaaacttacctatagaagatggtttggtaatccatcctatccaaacataccctttcttttctattttctttcttactttatacgtaatctgttccgctgtatacctataagatgcagagcaacggcagggtaagtgtccatatttaagattgctacgcgtcatataaaacttaccatcacatagtccagctttaacatattcatcatgagaacaaacaggacactgaaccatccatactggatcacaccctttacgttcccccgtgttggtgaaaatagtgccttccttaaacttccctgtagaaaagaaatctgcaatatgttgatcgtcgggtattgtttgtgacctccttgtgttctcatacctacatataagacaaccactgccatgtttaaaactatcaaaactacatgtattccattcatgaccatacctacaacgtagcatcattttcgtacgcgcacctttaaacggttctacgatacctatgatggtaatccccttagcttccgctattggtttacattcagtaaggtatgtttttaaatctttaatttgacctgcacacataggacaaccactaccacgtttaaaactgttaatacttgtagtatcccatttataaccacaatgacacaacaaatcaagttttgtattaacccctttccattctcccgtccatcctaagatttggatttgcttactctctgctattggttgacactcttctttatattgttcccatgattttggtgctgccatctgttgctcctcttattaatctgatatccatacaagagaaaacccgccgaagcgggtttaataaatctcaacttattagaacacgctacctaatgtggtggaacgttgtgttacaggctccagcaccactcgcagagtgtttcctggtgtagtgctcatcaccaggatcttaccaccttcaatcagatcacaagttagaccatcagcagttgcacatagatcaatatgtggatcaccatcttcatccaggataacataactgttggtttccattgcttcaacttcatcatctttcaagctttgcagatagatgttcagggaacaagcacccgacaaaaacttagtaggggtgaagtcgtgccagttattgatccaattcaccttcagagttttgccattagctacgatagaagccacattccatttagcatcattgcctaaagaaatacccatcatttcaaggcattctttaaaagtcatttttggatagaaattcaattcttctacaatgccttgaataacatcgaaagacaactctgtgctaacatcccataaacgttggaagttatctacgtgttttttatttaccaagttcttatccaagtaatctaacatagtttcactagacagtttatcgtaattgaaactgtaatagatacgactaggacggtttacaaaatattccgagatatagccgctatttttagtgaggatgtaaagtttatttccacttcctgttccatccaacaaggtcaacagtgcttcctgatcttctttcttagcgtacactttatcaaattcgtcaaataaaacaacagcacgatctgtaattttactcataaattctaagaatccagcatctgtgtaaggctgtgtcaccaaaatggttggaatacctaaaccttctgtggacattagggacatgctaattagtttagccaacatcgtcttaccactgccttttgtccctgtcagtaacaccccagtatttttaccttctttactacgacgagcaaatgttttaataacatgtgcggcgcgatctttagtttccccataaagagtgttcggaagagagaaactttcaccacgcactaaagagtagttaccgtgcggatcgcagttgacaacccaaactccagcaggaagtttattagcttcaacgccatattccttatttacaacagctacatctccaaaaatagtgtatttcattagaacgtttctccttttaaaataattactgtaaactttgcagttttttcactcttaatattcttgactaataagtattctcctccaagggcatctttgtattgtttaatagctactatttcatttttgcaagtagctataatcgaataaaaaggacgttccgtgttatcttcttttcctgtatatgcctcaacatctttgcactcttctagaacaccattcccaggtgtatagtaaaacttgttgcctgtgatcacaacatctttaccaatatccgttttaactgctacaaatttttgagcgtaagtggtgaagcttacggtagccagcaatgtggctaagattaattttttcataaacttccctcctattcccacaacatacaaatcgcagcgacaaacatattagcaatagccgcaccaagaactataaacatcgccagttcagaacaatattcaccaaccagaggggatactattgcacaaagtagtcccaatgtcaaacacaaattgatgatgaagtttaaaatcatattctctccttacaaccaaccctttgcctggtagcctttagaaaatccatcttcccattcttcgaattcctttttgtgtgtcattggacaatatggatttactttattaaacataccaaacttgaaccctgcggtataccccttcttaaaagctattgattctaaagagatcatattctttctcctcttagaactcgacaattattttgtctaagtgttctgcttcaacttgggataatgttaacacctgcaccaaacctctgtcaatgcctaatttgatcacttgcaaataatcgccaaaaagatcagagatttcaatctggtgttcagtaaccaccacgacctcgttacccttggtatactctctccagattcgtccacacttgtaaatgaaatctttctggtcttcactgatcatcttaggcttaacgcttaacattacatactcccgtattctggttcaatattatgtttacgacaaatggtatcccaacgttcattaccaaaacttcttccatgtagagcgttaaatgcgaaatgctctgccaaccacaatactacatcatcaggatctgtgtcaagaggaattctaaactctcgatcataacgcatacgcagaataaaatccttatcatcttcaaggagatacatgtgacttttagcccgtgatgccaaatcaaagaaaggaggctcgtctttccaaacgtgacgctcaacttcaacaccatgatcaactaccagagtagcgatcacctctctcatttctttactaaacatattacctccattaaccaattagttcaaccgatttgcaaatgtagatccaaactggagtgagcataagagttataccgaatgcacaattccacttaattcccatttcctctattagagacatgattaagccaacagcactaataatcagataaatccctaagaaagccattgtgaagaattcagacatatttagctccaaagattatcaaaataactagcgaataaaagacggccctctaaccgtgccttcctttgatcttcagcatacacgatttctggattaccactatcaataaaagcattctccatcttttctaaaatatttaaccactctcttctacctgtctcctcttcttcatctgtatacggcgcacttctatttggatacaaaacacgcatcagtttagtggggatcatgacaaacgtgctattgtttgtcttctcacggaaggctttaattcctgcatagattaccttccccaaagctgcatccaaatccatcaggtcactttcttctatttgaatttcatcgtgtacaattttcatcgtgccttctcccgatctgcatctaatttcaacaagaaagctgtatactcttccgaaccttggtgtaaaaacatgtgataagagcttaccagtttcttcgttgtcgtataacgttccatttccccaacaacacctccacctagtgtgtagagcacaataccttcaactccaacatgggttactacttcaaccaaatctctgttatcccaatagtagttaggtgacacaataagatctcccactgccagtttaatgtttgctacttcgtcttgtgaatagtacattttgttctcctctcacattaagacacgttttgtatcgatgggtgcattatcaaacatgttaagaacattgtcaagcagttttactaattcatttgtaatttgttcttttgaacgggaggaagtgagcactttgctttcaccaatgatatgcataacttttataggggcatctaaaataatgttgtgttgacgatcctcttcaaaagaagccaaccatttctcattgttaccgtgcaaggctacaatcacaccaaaaccgttaattgtttcagaaatattcttagttgctaaagtaatgttcatcatctacctctcttgttaatgttcatacatgatacctgaaaataatttcagatcaagtattgacatactttttaatcttgttaagatcaactcctaccaaacaaaaggagaaaacaaatgcaaaacatccaaaacatcaaactgacttggcccgaagctaaagaagcaatgaaggaaggtagacgtgttgagcaccgccatttttgtggtggcgaatggtttgagatgcgagatggtgttattctcgacgaacaaggttataacatggaaacttggttcagaggggaagcttggcaggaagagggttggtctgtaattgaaaaagaagacagtaaggaagaaggcgtgttgtctaatgtagaacgcgagatgagggaaacaaagatacctgctttggattttgtatacctggaagaacttgtggcagcatcttttgtagcaggaaacctttggaatacacctgttagccgactggagaaccaaaataacccgtctactcgtaatcacaagctttataagggtaaaggtcacaacaaattaaagaaaggaaagaagaaatgatctacaaaaacaagttcactggttgtcttcgtaaatttatcgataagaaagggtatgtttctcttgacaacggggctacatggatagagaatggcgcttcagaacaattgattaaagctttgccttactacgaggaggtttaaatgtcaaacagtctgtttagcgtgtcaattgcaccacgtgtcaatatccgttgtcagtttgttactttacctggtgtaacgcatatcacattagaatacgatcctcgctcacgagacaacccaatcacagggaaaattgattgtgcttatggagactttgttatggatcaccaaaccctcttatgctgtgtgcaacgcttacaggcaggatctttatacatctttaagaaaacagtgttccaagagattgctcaagcagttgaaagcggtatggagactcttaacgttatgattgaagcagccaacaagaaggaggttttatgacactttatcacgtaactacagaaggcgactgtgaaggccgcactacaaaagatttggggtatgttgaagcagattcacctgaacatgctatcaaatacctgcattccatcgggaagtatgcgggttatgagtatactatctacgaggttgaaattattaaccttatacaagtggcaactcctatggcagagttgaaacatcttaaggcaaaagtaagacctggtatagtgtccgattacaaaggggaagtaaagtgagtggatggattaaagtatctggtaccgaggatgttcctatcggagagtggcttgtaatcatggcaaacggcaagaagggattctgtgaagttaacaaaacacgcaatggcacgatagctgttatcaatggtcatttttattttgacttggcacctgtgatcgcataccatgcactaccaacatatgaagaggagattaacaatggctaacaaagaaccacatgtatatactgcactggtaaagcacttgaacaaagaacgtaacaggatcattgcagattatcgtaaatttaaacgtagtagtctaaatcgtaaatacatgccacatgcagcttttgacgctacacgtgcagtatttcgtgcaaagattgcggaaatggataatctgcttaagcttgcacgattatctattcatgcatccaaagtaacaggagtcactcacttctttgacttcgatactaaagcactatatgcaccagaagcaggtgaacaattgatttatctacttaccaaaaaataagtgttgacttttttcaaaaaatatgctaccctaaccccgaagggtcgagcgatagcgagtatagattatgtaatagattaatctctatcgttagatgttcgaagaacagagatttaagtacttgttcttatcggtagatgatcgtaagatcaagaacaataataggagagtgtgttatgttagtcagtgaaatactacctgactctaatggtaatcagatcactgttgattggtttcctggtactggtacactagatctaactgctgaatggtctggtgatatttatggagaaggtgtattatcattgtctacagaacaaatgatcatccttcgtgacttcttaattagtttagatctaggagaaaacaaatgagtaaaacttctgttgagtttatcgagaaatcccctgttccaaagttataccgtttatctgaaattgaacctatgtctgttttctactattacattgcagaagtagatgaacaagaacgggaatactatttggctacagatacaggtgcagtgtgcttaacaggttctcgtgcaggagaatacattgtgaatagtcgttttaatgaagcagactcctgttgggctaaggttgaaactaagattgtcatcaacatcaccaatcattaagactaatctgacaaagagttacttgacatgtgcaaagctctttgtgtagaataaagattcacttactaaggagattttataaatggctacaaagaaacagaaaatgaaatgtcttactctcactgaactgggtcaagcttccaactgcgttactgttggtaagatttattctacagttcttgataaagacaacaacagttttactttcaaagatgataacggaaaccctcaagttggaatctacccttcctgtgcttttggtacttgggaaaaagtttaattaactgatcggagggagtatgcaagacaagaaaaacaatgttcgttatgctttgtacggacgtatgggcgtagactgtgaatggagacttctgttacagcgtattccctcttatcaagaagctatgacgaagcgagaacattataagaagacgtggagacacgttgtttgcaaacattacgaggaggcatgatgagcacattatcaacagcagtcaagttccaccaggattatgaagaagctgtcaaagatgctgacaatccttcctcattagtgtttgaggatcgtacaggtttgaagtgggttaaatctttcgatgagatctatttctggtatccgcagggagccacaagcgatagttctctgtatagctacgaactggaataccgtggccctgtagacgaagatgaaaactttatcatgtatttcgtaaataatggttgcggtgaaacgtttaatgttgtattctctaaagcagatgagtctgacgaggaggtgtaatgttgtataatccgactttaagcttggcagttgcagcccacatgctgtacaatgattctgtgaaggatgagttgtcgcctgtgagtttagctttctatctgatagacagggattggatgttctctggtgaggatgaaatctactacgtaaattcacgaggttttattgaaagttttgaacttgaacatcgcgcaccaacagcagaagatgatcgttttattatgttctgtgtaaatgatggttacggagaggtatatgacgtagtattcttcaaaaaccgacagaagactgaagaggaattctaaatgaaaaggctactttgtgtcctgatgttgatgattgccaccaatgctacagccgcccgtgatggtttcaagattggggtggaaggtagccaattcttcacttggtatggtggtgaagctgtctaccaggtggatgataaaaagtataactgcaagtttgatcgtatagatcgtggagtggataattggggtgacgcttacaaagccacaggtttctattgcacaaaagatttatatattacagtcaaagaaccacaagacaatagaaaggtgttgttcattgtggtaaaccctgctaaatttgaagaacgtaaagcttactatgcagatatgttcattgaatacaaaaaggaggaaaaatgagagaaacaatcgtagatgttgttattaatggtcaacgttatgtgcctgttgtagagaaagctgaaccagacgctttagatgttgtttttgaagacgatgatcttggaactgttactgtgcgtgaatatttcagacgactgctctctacactttgggaagaagaagatagtttcagtggtaaacgtccattcggtaactcttgctggcagtttgatttgattatcggtttgatcgatgctggttatctggagggtaaagtttatcgtgatgaagatggtggtatagaagataccgactatgatcgtgaagaagcagataaactcatccaaggtctgatcgcacgtatgtgtttaggttaatatgaaggtattaaacttttaccatttaggcaaaacaatcccagaaggtgctgtttatattggtagagctatgcctcacatggggctaaaagcctccaagttcgcaaatccttttaagttaaaagaggatgaaccacgaggatcaactatacaaaggtataaagagtggttgtgggagcaaattcgttgtggtaagatcactcttgaagatttattagagttagaagggaaagatttagtttgcttctgctcacctcaaccttgtcatggagatgtattggtagcagccgtagcttgggctagaaaagagtgggacaaaaggcatcctacttatgtagacaattattggatttgggaggagaatttttgaaaaatattattgatgtagatgtgtttggtatcacaacactacaagacaaacaagcaacattgtattatcataaaaaagaggaccaagcttacatctacatcggggcagaaaagtttggtgtcggagatatggttttaaatgttgaaggagatcttcctttagaacaaaagttgaaagtttttcgtttcacaggagatgttaaactagacggcgttatcgcaatcctacaagaagaccattattatatggtaactttcgttactcctgctttctctggccttaatggagaagacgctcttaatgatgttattatcttaaagattggtaatgctctaaacgatgtaaactaaagggggagtgagtatgttctttgatgcaaattctctttttgtatctacagcagggcagtctgctgttaatgcagaatttgaggaaagagaagaatggattgataatcacaactacgatccaggtaatttaaactggtgcagtttggatgttggtaatcttagtcgagataatgcacttagagcatactactctgtatatactgttgacaatctttatcaatactacgtgtttcgtagtcttattgttaatcttaatttagctggacgtttaaagaacaataaggcattcacattgggacattatattcccttccgtaaagggggtgtgcattttccatgtaattggatcattcaaacacgaaaagaaaacagtttagcaggagacaccatgccaagatttaaagataagtggacatgggaaaaacaaatgggatacattaatgcacatttgccacctaatctaaaagaaccttacgccagcagagctaaggaaatgatgaggattgtcaagagtttttattaagagaggagaaatacgtgtctacacaattgagttttacacctaccgatgaacaatacgctattgaaagtgggtatcaagaaaatcgtttcgttacaattcaagctaaatctggatcaggtaaaacgtcaacactgtatatgttggctaatggcacaaatgatagtattctatacttggcgtttaacaaaagtatggcagaggaagctcgacgtaaaatgccgcctaatgttatgtgccgaacgctacattcaatctgttaccagcgtcttccacaaaaccttcgacacaaattgtctcgtccagaaggtcaatatgttaacgtagctggaactggtagtgagattgccaaaaaattcaagattcagaatttgattgataagaatggtaaagtgctactgactcgtgcaatgatcgggttaatggtaaaacaaactttagctaaatatgagttttctgacgatgaacatattggacataaacattttcctaaagtgcatatgtcagatcttaaacgtaagaacatcaacgaacaaaaacttattaatgaagttgttaaatatgcgaagcaactttggcgtgagcgtattgatcctaaatcagaaaccattatgactcatgacacctatgtgaaactctttgaattgagtaaagaagatttaggatacgatattatttttggagatgaattccaggatgttaaccctgcattcctgtctatccttcgcaatgctaaatcggctaaacgtattgttgttgtgggtgatgaatttcagagtatttatcagttccgtggaagccagaacatgatgaagcaaacggctacatatggggttgagttgcctctgacagcttgttttcgctttggtcctaaagttgcggacattgccaatgcgatcctttctgatcgctcacctctgaagcatccgctggtaggcaaaggttatgatactgtcactggaagttttcattctgatgtggtagattatagtaaaccttacaccattattttccgtaagaatttgaccctgttgctcgaagctatggatcgaatcgctaacggagaagagattattattaacgtagataccaaagatttcatttctatggttgatagtgttaatgctttacgtagaggtgatttggacaaagttaagcatgagacagttctaccttacacttcttgggaagaatttgtagagtgtgcagaatcagatcctgatgcaaaacgacttttaaacattgttgtttctggtaaagctaataatattgcatacactttacgtatgcaccgtaactctccaacggctaaagttactttaactacggcccataaatcaaaaggtttggagtgggatcaggttattgttgcaaatgactttccttctaattatgataagaagggtgagtgggtaggtcttgaagaatcagaacgaaatcttctgtatgttgcacatacacgttgtattaaatgtctacaatggaaccggactgttcaagagattctagacatgcatcgtttaggtaagagcacggctcctgtatccgaagaagataaacttatagctgcccttgctcgtaagattaatcaaatcagagaggatcgttaaatggcagggtatcacataacagacattaagaaacaaccttatggcagcatagaaaagattaaagaggaagtagaagaactttttgatgctgttgaacaggattgcaaaataatgcaacttgttgaattatcagatattataggggctgttgaaggagttttagaacaacagttcccagatatgactttacaagatttaatcattatgtccggcattactaaacgcgctttccgcacaggaggaagatcatgaacgtagctgttattgctcaagctattgattactacgggcgatttgcggagatgttggaagtcccttatcttgtagatgcggatatccttgcatatacattaccagaaggtaaagaggatcgccccttggggcatcctaatggtaagttctacgtagccagtgcagagcagtctttcctccagatggagaaagatgggtttgaattttcaacagatcatccttatatggctctaacaccttgctaccgaacagaagaagagttggatgatgctcattttaacattttcttaaagttggaaattattgagttttatccaggagcgtccgtcaaagaatatgccgaaactatgcgctatttcttttggacgtattacaaagttcaaactcaaatcatagagacagatattggtcttgacgtggaagatatgtatgggttagaattaggttcgtttgggatgagaacttctccacaaggtcatccatatttatacgccactggtatcgcagagcctagggcatctattgcaataaaacgaggagggttattatgaatgtatatgcacataagcaagatttggtaacagcggcaaacaatcggggcttgttcgataggctttgcaaagctattgagattgcatatggttggactaaagagacagatcctaaacttacaggacaatatgctcttttacacggttgcacaaattttccatacatctgtcacacagtcgggaccgatgaattttctggagagccgacaataggagataatgaactacgttttacaggagatgcaatgctagatttaatttttaagaaaactaaaatgctaaaaattgaagatgtttacacagacactagtaacctttctgaagaagaaattggagaaatgattactactttcaataatacaacagggaagagtttttggactaaaagcgatgcttcccgtcttaaacgagtagaccctgctattccagaagacggtaagaagtatcgaaaagttatcttttacgataaaatggcaggtctggatgctctacatcttgagtgtggaagccttgtgcctccggctgttagagaacatgaatttgcagttgaggttgaagcacaggagtttaaagatatgttttatactaagcatgtaagaaaagtggaagatgtggaacaacaaaaagagacttttgaaccagaagacacagagcctacctatattcctaatacaggtgttatgccttcagaagatttcgtgcaggttcgcttcaacaacggtaaaacagaggttgctaaggggacagtattcaactggagtgttgacaataatcacgatctggaagaatgggcgattaaagaatacttcattctcccgcgcacggcaaaatacaactatcataatggtggacaccgcccttgtggtggtcacgtagaagttctcttccgtgacggaactacggatagtggatcggctacgcatttcacttggggtcatcatgaacaggatcgggatattgttggttggcttccaactaacaaccctaaaccacgttaccgcaagcgtcgtcagaagccgccagtaggtaagaagagtgtcgttcgtgtcctctacactacacaacagacctacacatttaaaaatgtggtagacgtgcaagtgactgaggagcgagtttatatccaatatgatcgtgaagttacagagggtatcaaagaatcggttactaccgaaattgaaaataagcttgttatggcgatcattgtggaagaaagtaaagtagagaacggtaaagcctacactgttcgtgatagcttcttgcgtaatatcgatggaacttgggattataatggacatgatgggaccgctgtaaagaacggtaagattatgggaagacaattcctctccaaacgataaaacttaaaggcgcactttgcgcctttttttgattttactcaaagcttttttcggttggaagaggtagaataatagttctactcacaaaataaggattaataatgaaagatttgtaccaagatgttttttcttttttagatcgtacttcagaaacatacactagagagaatgcaaacaaaccttcccacctcgttaacacgcatagggatctcttggcggggattttaagcaaacatatggcaatgacacagatactgccaaaaaacttgtcagagtggcatacagaaggttttggacatattcacgacttggattatctactctctcctcttacaaactgttgtcttgttaattatcaagatatgttagagaatggttttaagatcggagccgcacagatagaaaaaccaaaatctattggggtagctaccacagtactaactcaaattatccaagctgttgcctccagtcagtatggaggtcagacgtgtgcgcacattgataaaggtcttagtccttatgttgaagctagtttccttaaaaacatggagataaccaaacgtcgctacggttgttatgcaaggaaagaagccctagaaatgaccgaacaagatgtatatgatgctatgcaaactctcttgtatcaggttaatactttaatgagtgttaatggacaatctccttttattacaatcagtatgggtctggatacctctgtttttggcagaatgatcacagctaactatcttaaagtgcatagtaacggtctaggcaaagatcatgtaacacctgtattccctaaagttattttctttttacaagaaggtgttaacatgaaacctagtgatcctaattatgaccttaagcaacaagctttggcatgttgtgctgatcgtatttatccagattttatttctgttcctttgaacaaagaagttacgggatcagcagatggtactgttacgagtatgggttgtcgttcctttttgtcgtactatgccaccgaacaaggagaaaaatatgatggacgattcaaccttggagtagtttctatcaatttacctctgatggctgcggaagcgagaagtaaaggagaatctttcaccgacctccttaataaacatatggagatagcctacgatgctcacatgttacgtgtaaaccgtattaggcataccaaagcatctgaaaaccctattcttttcatggaaggggctttagcgcgtttaaatgccaatgatgaaattggtgttttgtttgaaggtggttatgcttctattagtattggttatgtaggtcttgccgaagctttggaaatcctttatccagaagaaaaagataaaaaggaacttggtaaaagcattctgcaacatatgaaagatgtgtgtgctgtgtttaaagaacgatctaatttggcgtttagtctttatggaactccagcagaatccttgtgctataagtttgcaacagctttaaatgaaaaatacccaggtttggtagaaagagactatcttaccaactcttttcaccaacctgtatggttggtaacaaatccttttgaaaaatgggattatgaagcaggttttgcacagattagcaatggtggtaacataagttatgtcgaaacaccaaacttaaagaataacttagaagctttggagactttagtggactacgcttatgaacatattcactattttggtattaatcagcccgtggatcaatgctttaagtgtggttttcatggagaatttaaggcaacggctaaagggtttgagtgtcctgattgtggcaaccatgaagaagaaactatttctgtagttagacgtgtgtcagggtatctttctgcccctaattcacgcccttacaacaaaggtaaaatgcaggaagttttgcaaagggagaaacatctttgaattttgcaggatatgaacctgtagatcttattaatggtgagggagttaggtgctccctctgggttagtggttgtagccacggttgtcgtggctgttttaaccaaaaagcctggtcttattcttatgggaaaccgtttactgacgaaaatgtagagcaagttttaaaagatttgtcaagaccgtttgtaaaaggtttaacaattttaggaggagaaccattagatccgcagaatattcacaatgttaaaagccttatagaaaaggttagagacgtttatgggtcaagcaaagatataatggtgtatacaggatatacttttgaggaagtgcctttgtatattaaaaatcttgttgacattattgtagacggaaagtacgaaataaacaatccaactacaaaacctttcagagggtcagataatcaaagattatggaccaaaacggcaagtggttggcaatcagattaacttaggaggtttcatggttacatattttgctgtaggagatagagtagggacggcaggagaactgttgaagaacagtaatcgggacgttaaggagattcttgcaacccttgtggatattttacaaagaaaagagttgctttctgatcgagatgttgctaaattacttgatatcggaggagatgaacttcaaagacttccattttaagtgaggagataagtaatgcaacatagtgtagtagtcaacatgccgaacagcggggataaatcttttggtgtccctgctaaaaaagtgtggaaagcccattttcatcttactttatctaacgttagttctgaagagttgatgaaagcagctaagattattggtgccaaatgcacaacaattgatttacatcgggatacaaagtctcaacgtgatcgtatgttaacaaagtatcaaagcgatttcgacactactttaatgttgcagtgtgtagaaaaacttgagaatgcaggtttcaatgttgttcgttacaaactggaacgaatgtttaaacatgttgcctgtgttcttttcatggatctaagcaaagaaaattatggagaagttcacattaagacttcagcaagtgatcccgaagtagaaacaaacttcttccgtatttcttctaatgctgaagaaattgattaccgattttataatgctcgcttatattccgcagaagacaagttgcgtttcaatgaagcatatgatatgctcttgaacagtgggatacagataaaaggctaccacatagaacaagttgtggtagacagtaatcttaacttagacgcatggtgggcttaatatgactattaaacatatctcttttgatgtatggaacacactgatcacagcaaactccaattacgcagacatgcgagcctggactatcgcaaaatatggagatattacggaagtggaagcaagagcagcttataagaagatcaaaaaggaactggataatgcagcacttcaaggcaaagccgagtgtgcagcatacgcttgggaaagacttggttctgaacttgggataacgccttggaagtctgcaaaacttcgtttcgagtgtgaacagtggttccttaagtttccaccacacgtagccgtggatctgccgatgtacttgctgtatctttcagggcgttatgatttgagtattaagagcaataccaacttcatatcaggggatatcctgcgtcgtgcttgtaagtttgatagttggaattgttttgagttcacccatttctcggatgaagctttactttgtaaaccagatccgcgattctttgctcgcacgctcacgtattctccgatccctctgttagggcacgaagtattgcacgtaggcgatagtgaagaatatgatggaaaatgtgttgacttaggatttaacttctgtcatattaagaaccctaacgacttactagagaaacttaaaagaggagaaattgtaaatgcgtaatcaaactcaaatttttgcaaataaatttgatgacctggaaactgctacttttgatatccaagattattcaaaattgaaatttggtagtaaccaagctgcgcgtcgtatgggtaaagaattggcacttcagttttttgctcaagtggcaatgaaacatattggggaacaatttgttatcatcccttctccttataaccatgtgcataatgctgcaacaatgatgacagatcattttattaattactttaatatgttgcaagcacaatatgatcaaggtcgttcagcagaactggatattattcatcgtaaagttagctatatcaacgattatggtttcttggataaagctagtcgtaagaaacttattgatggggatacattctactgcaacaaagaattctggggtgataagaagcttgtgttcattgatgatgtaaatatcaccggaactcatgaagacaaactgattgagattcttgatgaaaatcaagttaaaaatgatgtttacttcttgtattttgcaaaatatgaaggtaatcaagcagatactgaagctaaactgaattttaactacatcaatacaccagaagcgtttgttaaaatgattaatgaagaacgtgatgcacagtgtcttgttcgtcctattaagtatcttatgggccaaaatcacgaagacttcaaaatcattcttagccaattgccacactactatgtagagcaacttttcttcggatgtttgggagaaggctataatcgaattgcaaagtatactgaaaactttgagttcttggatcgctacacaaaacaacatattctataaggaggaaaaatgttgaaggttgttactgggaatctgatcgatgcagcgaagaatggggaagtgaacgttatagcccactgttgtaactgtatgtgtaatatgggtgcagggattgctccgcaaattaaacgagcatttccttatgcatatgcagccgacttggacacatccgcaggtgatcaaagtaagctgggttcttttagtttaggtgtgccggaggaggtgtctggcccactggtttataacctatacggacagtaccgttacgggtataacggtaaaggtcgtcagttggactatgatgcgctgtatgatgctcttgaggctatggcaaaggatctccacaaatgggtgaacacatctgccgaacataagattggtttacctatgatcggagcagggttggcaggaggtaattgggctatcatcgaagtgatgattgaagaaactttagtaaaagcaggtcacgatgtgactatttataaactttaagaggagattagtatgggtgtttttgcaggtattgttgcagtggtaagcttttttgttattgcttttatgcttagtttgattccagcttggttactgttgctggcttacaactatgttgctgaagttatgggtcatgcagatatcactgtcccagtaaccttctggaccgtggtttgtgtttcgtttattctggcggtattacgaggaatcttttcctctcattcaacaaaataagtgttgacatagttcttaaaaagagtaagatatatcacatgaagcggggaatagttccccgcaaagagaggagaaaagaatgcaacttggtttcccaattatcgatgtagttgttttagttggtattttggcattgtctattggtatcgatttctttggtcataaagagaataaagaaattggaattaaatctgctttgctttggtctgttttttggattgctttagctttaggatattacgcattcatttgggtagaacatggtaaagagtttgccgcgcttttcctaagtggctatgtgttggaaaagagtctttctgtagataacctaatggtgttcatggcaatttttgcaagctttggaattaagagcacacatctccaacataagattttactttggggtattgcaggtgccattgtcttccgaggtgtttttgttgcagcagggacagctttgtttaacctgcattggtcggtccaagtgttgttcggtttgattgtagcttggtctgccgttgctattatcaaaggtggtgacgaagaagaggatattgattactctaagcattgggctgttcgtttagtaggtaaagttctgcctgttcacaatgcactggatggggaaaagttcatcaccattaagaatggtattaaatatgcaactcctgctcttctttgtgtgtttgttatcgagcttacagatattgtcttctcttttgattcagttccggctgtgatcggtgtgacacaagaacctctgctagtttattctgcaatgctgatggctgttcttggtttacgtgcacttttctttgtgttaagtgtagctgtgaaatatctggttcacttagagaaagctgttgctgtggttctggtgtttgttggtgctaaacttatgtatcacccgttcggtgaaacacttcatgccaagtggtcattcctcccgcatgatatttcccctaacgtaagtctgatgattgttctaggcacattagctcttggtgttattgcaagctttatcttccctgaaaaagaagaagctgctgtttaatagatgagcctccttcgggaggctattttataggagagacttatgaataattttgatgaaattcaagaacttgtttgggatttatctggtgatgtggattacgttttagattatctttcaaaagtttaccctggggtaagcgttatgatcgtgaccaaagatccaattaatttgcctcctaatgttgtagcttgttgtggaagtggttcaggagaagtagagcctgtatctcgttgggaattaactaaagctgtttcaaaacgaaacggtgaagttttgaatattgatatcgaacaaatatggacttctccagcagccaaatggaacgatccaaatggttgggatttgttcttctgggataatgaaactgatgatgaggtatttttaaaatgaaatacttgttggttgtgtttgaaaatatctgttttgcaatagggttgtttgttgtaatttttgtattgacaagcgtaatcaacggcagtaaagtgagtttataccgagatggagagcaactttattgcttctctggagatttcaaacacagatgtattaatagccaaaacgaggaaagcaaatatgaaaaaactagccctgattttaattggttgtatctttttaacagcttgcgaggatgaaacaaatcctgcacaataccaacaacctcctcaacaatacgctcaacaaggatctgacggagatacaactattatcaacaatggtggcggttctagtagtagcggtgttggtgagtttgctacaggtatgttgttagggcatatgatgagtggcggtagtaatcgtagcagtggggattataacgataacagaacgattattaataagcattataatacacctaaaccgaaaactaatttttatagtaagcctaaacaagagataaaaacttatgaaaagccgagacaaacttttaaaacaaatagtagctatacaactcgtaaatcttacaatagccctttaagtaaaaagagttcatctcgtagcaagcgacgttaataaggagaaaaacaatgacaatttctattcgtacttccattacaggtgttaaaagtttgcctaatgctttgcaaatcacacgtgctttgagggatacgttctctgctgtggatgagcataagatgctcgataatctctcaaattggccctattttcattattttaaaaatgaagacgacgagtttatagacgctgtttcttacggttatgatttcggtaaggaggtttctcctgaagaatttgtagctacggtatttccaaacggtttgcctactcgcagtaaacgtaaaaaaggaccaaaaaacaagaaacgtgctactaataaagctaccattttctttactgatggcacacaatatacgattaaagattttgaagaggtatcttatacagcaggtgggagtctttctttctacaccatcaaaaaacaaaactatacgttcagccatgtttctaacatgattgaaatgttagtagaagatattgaaagcgtggctgtgttaggtatgcataaaagctttttaattacaaatatttcagatttcagtgcaagtttatctggccctgattttgaagccacgaccacgtatttcgcttttaaggtgtaagttatgcataccgagagagacttgcaactcttgtggtgggaagtgatgcaggaaataaaagaagattttcctgtttactacaacatgttacgtgaagcaggatataaagcttgtgttagaaacaaagttaataactctttcggttggtgcaactaccgagataaaattgttgttgtaaattggcacttgcataagaactctacaagagatatgatcgtggatacaatgaagcacgaaattgctcatgctattgatggttgtatgggtaagtttagtcggcacggtgctcattggcaaaaactggcagcagaattaggagctaatcctaaagccacttccaaagagccgttgaaccacgaatataaatatgttcttgttctggtagataggtttgcgacaagatgtgttagaggttataatcgtaaacctaatcgcatgtacccaggcaagcaacctaacatgtggttgaaatcagataaagaaggaactgaaggaaaattatggttgtataaatgggatgattgggttaaagtagctaaagagtacggtgtttcaccatatataagagatgcagaagaggagaatgaagaatgacaagtccatttttaaaagcagctactggtggtcagaagaagtctgaaatgagtgtattcgctgcaacaacagatgcaagtaaatctgtatttgctccaagtgtgttagatgccagtcctgtttatgcaccagcagcaccgcaagaagttccagttttaccttctatgacccgacaagagatcgaagagattggggcagaggcaggcacaaccttgcgttccttgaatgccgaggtattaaaacatcaacgtagtaatcaaggcgatcagatgagtgaacgactcacagctttgattaaacaggcaaaacaacttgatccaaactctattaaacaaagcaaaggtattactaaactcattaaaaaagttatgggtatgaaagaagacctgtttggggagtttgataatgttaataaccgtattgaagagttggtaaagaaccttcaaatggatattcgcaaagaagaagattccttggtatatcttgaaaaactacatcaagctattggacaatatgctgcaagtttgaaccgagatatgcagcttctaacagcaacctatgaaaaagaagaacaagctttagctgctcttccagaagatgcagtagaacagcgacaagtgatccgagacactttggatcttctggagattcgtattgcagatttaaaggcattgcgtctactgtgtgtccaaatgggaccgcgtgtacaaggtatgcaaaaagtttctgcaagcttaatgcgatctgcgcgtaacatagtaaataatgttattcctgcttactctgctaacttctcaatgtatattgaaagcttacgtcaaatgaaagccgcagagacgcagaataacgttcttgatgaatttaacctggcaattaaactgggtagcgatcttgccacacagaatcagatcgaagcagcagccctggctaaccgtcaagtgctcgatattgaaactctgcgtcacgatcaggaaaacttggttaaaatgttggaagaaactaaccgcatcaatacggaagcccgtgctgctcgtgttgattatattaatgaagttcaatctctggaagacgggatggtagctgctgtgaaacgagggcttggtaaatgagaatccgtatctatataattgatgaagacattggtgtccgttatgatgacgaaaaacgattcgcaccgatgggaggtatatatcccccaagtgttctagcagtttgtcgtgattgttatatttatgaaggttgtcgtaacttccgtaaattccaactccttgcagatattgacttcaatgaggaggagtaatgaaaatattacgagtgaatattgaaactgcttggtgtggatgcaatgaggttgtggatatcgaaattgaagatgatatgtctcaagaggatatagaagatcttgcgcacgaaacctttcaggactattgtaattacgggttccatattttagaggaggaagaggatgtttaactacgataacgaccctaatattatccagttaacccgacaagaactgatcacaatcattgaagatgcttttattgatggctggaatacacaagacaatgattggggtggacccgaagcttttctggaacatcataaagcttatggagaattttgtgaaaccactgtagctcttgataatctgaaggagggtttgtaatgggttgttttagttttttgtgcaaagaatcgggcaaagctgccctttctacttctttcgacggatcaccttgctacctctttcttttgaaggacggtgttgttattgaagagatgtatggcaactatgatagttatggttgtgttttctctgggaaggaggatgaaaatggtgttcgtgaacgatttgaatgggctatggattggagtaaggtttgtgatttgatgcattcctcaaatccaagggacggtatcgctatggtgctggaagagtactttacaggtgaaatccctacagaacaatctgacggagatcctaaccaaggttggggtgatggtgaagaagatccagattgttttttcagcacagaaaagaataagtttaaacgtgttgacaacccttatcacaaagtgcataatactctcattgaaacagaagatgacaagatggaaattgaagaagatgatcctcttgtaacacttcctataagtgagttacaaaagatcactaaggaagcttacgatttgggcttcaaaattggtagaggaggtatgcgtgtttagattcaatattcaagaagaaaaaagtcaggatttacctattgctttcgaagatcttgacgtaggggccacatttatgtattatgatgcctatgaagacgcagggttggatacctaccgtaacttggtgttcattaaaaattccacaaacagtgcgatttgtattaatggatcactagcacaacgaggctatactcattgcatcccaccagatacaaatatggtggaagtagatttagaagttaccaatattacacttaagaaggagaaataatatgtccgagaaaatcagcctgaaaaaacgtcaagaaaaccttgctttctctctgaaaaagaataagaacctgaatgaaggtaagattgttcttcgtgtagcatgtgctctagatatttctggtagtatgcacggtctatattctagtggggtagtgagtgattttgtaggtaaactgcttccttttggtatgctgttcgacgataatcaacaaattgatatgtgggccttcaatacgagttcccaagagcttactccagcaacagcagacgtttacgatgactatgttggtaaatgtatgcgtaatgttcgtatcggaggtggaacaaattacgcccctgtaatggcagatatctacgatgagtattttggcactgttaccaaatatattaccactaaacaagtggtacaagaggaggctccaaagaaaggcttctttaatcgtctgcttggtaaaactgaaacagtgtctgtagagcgtgaaaaagttgtagctgtatctgaaccaggtgctgatgttacccctggtgttgtattcttccagacggatggtgagaatggtgatcctagtgctgttcgtcgtcttattgaagagaataagaataaacctatttattggttcatggttggcgttggtaatgagaagtttggcttcctgaaagaactggcaaatgcttatgataatgttggttttattggcattaaagatttagacttgacagattcagaactttatgacaaactcttatctgaggagttcggagagtgggttgttaaagtaggtgctaaaaaatgatcgacgagcttgcctctcaagtcgtagaaaattattggcgcgagagagaagctttcattatgcgcagtctcaaagagtatttcattgggactgtgcgaatggaagatattgtaagtagagtagagattcatgtatggcccgattatgaagaatgggttgacaaagaaaatgaaaatgctataattcttcgtatatacaaaccggagataacattaggaggaagaagtgttaaacttcgaaattgatgagcaaaaagtaaataaacgatgccttaccattaaagatttggatgtaggagatactttcgtctatgaaaatgcatttgacgaaaatggtttagaccttagtgaaatcattgtttatttaaaagtagatgatggggaaaatgattattctgctgtagaactaaaccatcatgcacaattagtatcaatccaaaacacatctaagcttttggaagtagaattgactgtaactggtattacacttaaataatagaggagacaaaagatgactgataaaatttccctgaaaaaaggctctagcgaaaaaatttccctgaagaaagttgctccggctctgaaagaactgcgcctggaattctcttggaaatctgattctaaactggatctggatgtaagtgcactggtttgtcgtcataatgccgctggcaatcctgaaatgctgtccgcacgtcatctggtttgctatgctaacaagtttgatcctgaacgttctaccttcgctggtgacgatgttcgtgatggaactgggagcatggagcagattgatattactctggctaaaatctctcctgatgcacaagagattgcctttgttctgaccattgatgatgatacaggtctgaaacgttttggtcatgcttctgaaggtatgcttaaaatcttcgattccgagcgcaatgtggaaattctggattttgacttcctggctcctgaagtagctggcaacacaatctgccacgtggcttccctggttcgtgaagatggggaatggaagctgaaagcatatggtgtaggtaaagctggtctggatatttgcgatgtggtgatggccttcggtggtaaaaaagaatggtatgaatgtccataataattaacaaatgattttgagggggagaaatccccctcttgcaataaagcctctatcgtgttatactagaagttcgttaacttaaaaaggaggcaaaatttgctgataaaaaactttgtaacagttgcgttactatccttaactgcttttacatttacacctgttgtggcgaaagccgaagctgcaaacgtaaaaaccgctaaagtagttcacaaatgtacaaagcaatataatgataaaattctattagcttgtgcaatttacgcagaaggtcgtggtctgggtaaaaaaggaatgaatgccgttgggaatgtggtaatcaacagaagaaatgatgcctacttccctaacacagtcaagggagtcttgttccagaaagggcaattctcatatgcgaaaacttttaacgtaacagagaaagataagtggcaggaagcaaaagcaatagcggagcgtttactttatttagagaaacattttcctgaattgcggtctgttttagatgttactaaaggtgctctatacttcaagaaacggaatataaggacacactgggaacgtgatatgcgtcttgtttatcgagataaagtgcatggtttctatctaccaaaggggagttaaaatgcaagaagataatactgttgttgtagcaagttacctggttgtcggtcttaccgaagaggatgtatactacacccgtaagcatttagaagcatacgctactttgtttatggaagatgaaaaggatgtagataaatatagcattgatatgatcaacgacagtatttatccttgtatggttcttaaagtagatgctgtattgtgggagcgttttgcaaggactcatgatgctgtagaatgctccgcagtaatgtctcaaaacaatattttaggggagattcactgatgggagaagtcattgaagtcaattttcgcactaaacagaaagtgcaaaaatatgtcgttattaaaaacatttgcgttgtctgcttcaatacagtaatatacgattcacgacgcggagaaaacgaaaatgaaccttacattgaaatttctaaaaacaaaggtcaatgtatttgtaagaactgtgcagtagctattaaggaggttgtaaatgaaaacgcttgggaccaatgaaactggcgaaatctctcttcaagaagtgacaaacgacaaactgattaagctacgagacgtagctcgtgaccatcttcaagaatcttttaaagaatacatggaagcacgagatcgtgtcatccagattcaacaagaaatgattaaacgtgggattgtagccgacagttaatataacggaggggagaatgatttattatattactccctatctgacaggaaatatcggcaaggctatcaatgaagccattgccgttcttccagatgatagttgggtgtgtttaagagataccgatacaatgttcctcctacctgatcaaccatctatgcttgaagagcttgttatgtcaaacccgccttttgatgtaataggtgcaacttgtaacaggttaggtagtggttatcagcttttctctaaccaaattaacgatgatccagatattctaaaccatatagaatatgctaagattgcaagagaatatcataaagtgagtgttgaagaagttcctttcggaacacctctggcaggtttctttttgctttttagaaaatcattgtggaatgaaattcctttcgaagaaaaatctatccaattcgacttaattttctctcgcactttacatgaaaaaggaaagaggttaggattgatgcggggaatgtatctgtttcacatttacagattaggtcaaacaaatcctcaacggtctatacatcatttattacactgtcatgatcacagtaaaactatttaggagagaaaatggaaaatattaaaatcggagtgggtgttatcactgtaggtgtccgtccgcttaaagactaccttgtaacagatccacgtgcagattttcgagtattcaacgatccagatcgtaaaggtgtagcttatgccaggaatgaacttatgcaccagttttatgaagaaggttatgattattggtttatttttgacgacgattgctacccagtcatggaaggatgggaaacatactttgtagatcaagctgtttctggaggatgggatttctttggtatgccggagtacttcaaagataaagttgttggaagcaaaggagaagttattctctgggaacttgcaatgtgtcaatttgcaatgtattctcgtgccgttgttgagaagatgggttatttccgcccttacactcacggttatggttttgaagatgccgaatggggacaccgtttgaaagctgctggtttgaatcatggtattcaggcaacaccttgtccgcttcgtatcatggcttatatccacccagacgatgtttttggaaacaatcctatgccttttgctaatctgacaaaagaagagaaagaagctgctattgggattaactgggaagaatataaagcatctttagaggatattaaaaatgggaaaatccgaatttcttatgaggaggcactagcacatgtcaaataaaaaatggactaaactgaaaattgatgcaaaaccccacagtggttgtgattatcatcgtattgttataccatttaacaacaataattttcagcctaagaaagatgttgtcgtgtttaaccgtattcattctaaaggggcagaatacgttctgtccctgaaacgtcaaggtgttaagattgttgtagatttagatgatttctaccaacttaatccagaacattatttagcaagtttatatgagtcaaacactcgtgctattgtagctatggttaagcttgccgatgtggtcattgtgactacggaatatttggcatataagatccgtcacttaaataggaatgttgttgtaatccgaaatgcacttccttttgatagcggacaatttactttgtcaaatgaccgttcatccggtacccctattgtatgggctggaggtgctagtcatgaacctgatttacgactagtctctaacacttttgatgatgaacttcttactattgcggggtatgaagcttcgcagagtatcacagggcaagagtggattaagatccgtagaaatttaccaaatgccaaatataaagctgctgtaaaagatttagataattacatgagtgtttacgaaagtcatgctattgctatagctcctttggtagacaatgattttaataattgtaaaagtaatctcaaaatccttgaagctggggcaaaaggtattccgattgtttgttctaaggtattaccttattttaaccctgtagatgctcgcgctgttgcttatgcagagaataaagcagaatggcattacgaaattgttaagcttcttcgcaatccgaactatcgggaagatcgcggcttgttcttagcggaacatgttcgaacacattataatctggcagatgcaaacgaattgcgacgccaggttattgaaagtttgtaggtgaagtatgggacaaataattcttgacaatcgtaacggaatcaattatagtgtctgcgatttccatagggtattgctgccttactcaaggcagttctcttcacaacctaaacacaacgttttcgtttttaacggagtgccaacaaaaggtaaagagggctttttagcccttaaaaacctaggttttaaaatggttatggatttggatgactcgttagttattccaaaaggacacatgttagaaggtatttttgaatcaggtattcgtgaacatttaaaatggtttttagagcacagcgatcttgttacaactacgacacctgctttgcaagttgaactttcacaatacaatgataatgtgcacataatccctaatggacttccttacgatgaaggtcaatttgtgttgacccgtgatcgctactccaaaactccattagtctgggctggaagtgaaacacataaacaagatttggctatcttgcccgattttggtaaagatcttacaatatgtggttttcgtagggattctgaagttttaagtagtcgtgaatggtctgtaatcagagaaaatgtagcaccaacttgtgtttatgaaggtgtaagaccatatgccaactacatggaatcttacgatggtcatcaaatcagtcttgcaccattgatcgataacgtgtttaataatgcaaaaagcaatcttaaaattcttgaggcaggtgctaagggtttacctttaatctgctctcctcgtgagaattatcatacacaagagtttaaagatttgttattctttgctgaaacaccttccgagtggaaagatattacggaatacttattaagtgctcccgatgtttgcatggagaaaggattagcattagctaagtatgtcaggactcattatcacattgatgtgttgaatgagcgtcgtagacttttatttgaggagctataatgattaacacttttgattttgaatacaccactcgtaacgggaaagccttggttgtggaggtggattactattatgaagaacctaatccactttctcgtgaaagcgattgggattaccacggagggcttttaattgacggtattcgtttttatgaaggatctacagaagtttttgaaaaagatttaaatgtaactgtagcagaaattgctttccaatttagaaagcacatggaagaactagaagcagaatatatgatggagactaacgaaccattttaacaggagaacaaagtgtcgcacattataactaaatatggatttgatgttgatcttagcaaggaagggcatacaggttgtccgcgctgcatgaaaaatggcaaggatcgctctcgtaataacctgatggtttatggattagattctaatggagagcataaaggtgctaagtgctttgcgtgtgaatacactattcctagcgtagaatggttacgagaaaatggtgaagttttagaagaagaggaggagattgtgggttcggaatttaataaacagattcatcgtaaaattgttcaagaaacatcaaccaacccacgtggttatcgaggcattaaagaaaaagtttcatctttctatggtgttcgttatgaatatcgtcaggaaggggatcagatggtagtagaaagttgtttatatccaactactatcggtaaagaattggttggttttaagcgtcgtattcatcctaaagatttcagtaaacctattggtcaagtaggtaaagatgtagatctttttggacaaattcgttttgcagaccgttctcatactgtggtaattacaggtggtgaacacgatgctctggcagcttatcaaatgctgtctgaaaacttggacaacaaatatgaacttccagcagtagttagtggcacaactggtgaaaccagtatgtataaacaagttcaggcacaataccctttctttgaaaaatttaagaagattattgtttgcatggataatgacaaagcaggtaatgaggcatttgaaaatattgttaaggtgctgcctcgtaacaaagtctaccgtatgcagatggatcttaaggatgccaatcagtatctggaagaaggtcgtgcaaaagatttcgtaaaagctttttggagtgctcgtctatacaccccagcaggtgtttatgcttctaatgtcttgtatgaagctgcattagaatgcttggaatccaagatgattaccttgcctccttttatgcgtgttgctgcaaatatgctgggtggtggtttagtagaggaagagattacagtcatcctggcaaagaccagtatcggtaaaactttgatggtgaacgagatcaccaaacatattatcgttgcacacccagaacataccctcggtattctgtcattggaagcaacttataagaaatattctcgtaacctgttgtcctcgttcctgcatattcctctacacaggaaaacaccggaagagaaatttcaaatcttggaagagaataaagaaaaaatcctagatttttacgaaagagaagatggatcaccacgtttttatgtgtgtgatgatcgtggagcagatgtggagtctatcaaagaaaaagttttggagatgatcatctattttggagtaacaattcttgttatcgacccttattctgatttgctttctggtatggatgttcaagcccaggaagagttagcaacatggttgaagcgcatcatgaaagagtatgctataactattatcgtcatctcacacgttaagaaatcggctaatggtggcaatgaacacttaacagaggacgatgcaatgggtagtagtttcttggctaaaggtgctggtattaccttggctttggaacgagataaagccgctgaagaccctgtagaacgcaatacgactcattgctttatcctaaaaaaccgtgagttctcggaaacgggtccggcagggcagttttactatgatattagaactgcaactctgcatgacaaagagcagtatttcaacaatcctgctaatttgcctacggatagcaattattaagggcttcggcccttttattaaaaaatacctgttgacaactttacggaagggacttatacttgtctcatcaaccaaacaagaggagaagtaaaaatgcgtatgacaatcgatctgaatgcaaaagttaaagctgctggtgctctgggtgctggtgttattaaacacaaacaagcgttggcatttgccatcccacatatgattgttgaggatcatcctgaagagtttgctgtaaaagttgttgagaacaatgtctctgttattgaacatcttccaactggacgttcttaccgtgttgtttcttctaaaggtttccgtttcgatgtaagcccttctttcacaaaaggtgctggtcgtagtaaagtgggtattctttcttacaaatattatatcgataaagttgcagatggtgttgcattctgtcgtgtaagtgaaggtaaagtagatatcatctttaaaaataccaaaaacatggttatttctgacgatggtaaagttgacctcactattgagttcgctaacaactaaggaggactattgagcaagttgaacacacttgatcaatattacactaaccccgcttatgcggggttcttatgtgataagatcaaagaaatttttggagaggaagctaactacgtagaaccatctgcgggagaaggagctttctcttcttgttttaaaaacataacttcttttgatattgaccctaagtttgaagattgtattgaggcagattttttagctcaatctgttgagtctgttggtagtgtaactgcttttgtcggtaatcctccgtttggaaaaaatgctagtcttgccattaagttctttaaccattgtgctgaaatgttggataacgaaggtggtatttgttttatcttgcctcgcacatttcaaaaaatcttttttgcacacaaattaaatccccatatgcatcttctttacgaagaagaatgtccaaaaggatcttttattcttcatggagaaccttgggatgttccttgtgtattccagatatggattaaacgcaatgagaagcgttctcctgttgttttaggagagaatcgactattcgtattaggcaacagtaaagactacgacatagccgttaggagagcgggagcaagtgcaggtaaagtgttatcagaagaagattctttatctgaagcatctacctattttttaaaagccttgacttctgatcttaaaacgcgtatcattgaggcttacccgttacttaaagctgaagctagtaaaactgcgggagtaagaagtttaagtttaaaagaacttcagtgggttctggagaacattagaaaggaggaatagtgagtaagtttacatgggatattgaagcaaacggattgttgaataatgacactatcgattatttagctagtccttatcgtctcaaagatacatttcaaatgcactgtattgtcttagagaaccatgaaacaggagaaatagtagctttccacgatggccctaaatacatctttgatgggcgtccttatgaagagtcagatggtaaatacacatatgttcttaaagagtatgtggcgcaggattacacgcattttcaactaaaagatttcccagactttattaatcatgaaggttattttaaagacaagcctgaatatctggttgaaatggctgtggctcacaacggtatcaactacgactggttggctacaaaactgttttatggattagattacagtgttaaatataatacgtggggcaaaaataaggtaaaacttattgactccttgattttgagtaaagtgttaaacccagatcgaaagattgagggcaaatcaggacatagcttggcagcactttctcgaaaagcaggtggtgatgtaaaaatagatttccgtaaagagattccagaagaagatcgatttaagacttttgctgcggatatgctttattactgtatctatgacaacaaagctaatacgagcgtatataattaccttatggaagaatggggcgattatcacaaatgggaaggtccatttgaacttgaacaacgtgtagcagacattattacacgccaggaacaccgtgggtttgcttttaacatgaaacaagcagaagagaaccttgcttttttggatgcagaaatggagcgtcttcgtttactcgttgagcctattttgccacctaaaccagcaacaaaaggttatcttaaagcttttattccacctaagttgcaaattaaaaagaacttagagccaactaaccatatgatcaattttgctaaaaaacatgatggtcgtttggaagagagggatggagattggtggttagttatgctggggaaagagtggaaactgccagttgcagcagatgaacctctatgtgatcctcacatccctgcaacattgaacgatacaacccatattaaaaactggcttgtaggattaggttgggtaccgtctgaatataaagataaagacttgactcttaaatctggcaccaagattaaaaagagcgaggaagaacttcagaaaggtattcgagcttacgttgagcaaactttatcttctaatttttgtcaggaccgttgtgatcatctggagtgcacaccggaaaccttggaaaggaagattcaagagcgtatagcaaaaggtaaaggtcgcggtcttaaagtattgactaacccatgttttaccaaaggtcaggaaaaagaaatctgtcctaacctgcaagctttgggtgagaaattcccttatgctacacagattgtagaatacttaacgtataagcatcgtaggaactctattttaggtggcggtgctgattgggaagaagatgaagaagatcaagaatacgataaaggtttcttagccgcagtaagggcggatggtcgtattcctaccccagcagctacatgtgatgctgcaacctctcgtatgaagcataggtctgtagctaacattcctcgtgtcacatctttgtttggatgggagatgcgtaacttgtttggtgtagaggttcctaaatacttccagatcggctacgacttcgactctttggaagcaaaaattgaatcacactactgttggcggtacgagccggagccacatgaatattgtaacgctctgttgttagagaaacctaacgatgttcacacaatgatggcaaaacgtatcactgaaactattggacgtaaatttgaacgtagtcctgctaaatctgttaagtatggtattacctatggtgcacaagccgacaaggttgctaaaacaattggtagcgataagtttacaggtcaattggtgtttgatgctttctgggaagctgcattcccactggcacgtcttaaagaacgtttaaacgatttctgggttaagactggtaaacagtatgttttgggtattgacggtcgtaaggttcctactcgttctgctcacgcgattcttaactctctgttccaaagtggtggggttatctgcgctaaacgtgcaatggttatttatgacgacatgatcgaagaagaagggctaagtgttgacttctttaaagatgactggaagaataaagacttcgtgcaacaaatgattgcataccacgatgaagcccagcttgaagtt

SEQ ID NO: 9 - DNA, 138298 bp, Escherichia coli phage ECML-10
  source 1..138298: mol_type = genomic DNA
ttatttgatgttattttttgtatcgatcagttcacggtattcaatcatagcaggagtgtcccaatatttcaagcccacatgcttcaaaagtggatatttcttttccaatcttgcaatataggccttcccgcacttaacccggttggcgattaagattttggcacgatgatttagctcactgtgcttccacgcggtgttaccttcccacttgtggaaatgtggccgataatttccaaaatcctgcatggggataattttccctaattgtctatacaggctgtcatatgaagtttcatttgctgcgcgagtcagtaagaatttccaggcgtcctctttcaacaaatgttccacatttttctctgtaacatactggcaatcaggattagtccaaagcagacgggattctgataccaggtacaggtcttccccttcaggaatctggagtgccgcacgcacacggtcataattttgctggtagatgttactcagctgtcccagccaacaacttccacgttggatatcaccctcataaggaatgcagtgcttaatcttcttgaactctgccttagtaatacgttcacgacggaagtaaccatccttctcaagctttttaacccaataacctggctcgtaatgagtttttgtttcacctttcttcgcaggtcggcgagggagctctgataacaatttgaccgtatctgcaaagaacgggtggtgtgccgcttctttaaactcttccaccagatccgtgttacggcaatagaaaacgttgcgtccggtgatctcgcttaagtagttacacttatttcggttatatttgccgtctccgtcgttaaatacaaggtatacacctcgtaagaactccgactttccgtaacgagcatagcctatgcggcctttatttaagccgccagcgaaaatttcacaatcgcctaagtcgccaagccctgtttcttcccaacggttccacataaagtttttgccgaagatgtgtccgaacaccccactattcttcatcatttcacgtgcttctgctgaggtttttgccgtctccagttctgcaacaacttctgccccgcgaagacgtataccttctttaacaaaggcctccaggcgatcctggaatccaccgtcgtcatggccctcaatggtccattcacgcccagggttaatattgcaatccccgataggaatttccacgcagattgcagggtaatcggtcaatgtctccaggaacttagagcggtaaggttggtgacccatcacaacacggctctcatcagaactggtataacctttcaggatggtcattttccagccatccttctcgtaatgatactgtgcctcaaccttgtcaccttctaacatcttactggtcatgggatcggtgacggtgaacggaaacttcgcatagcgtaagcacgatgcaatagcagtgcgatatttcaggacatgctctttcttaacatgaaactgaacttttaccccgttgtgctcttcagtcttccgctcgcggatcttggtaacgtttgggataccctgatccaagaacaatagatatgtgctttcaacaccattgtgcacactgataacatcgaaagtgtccaccatgctgaacggagcctttgaaccaacacctttattacctaccagagcgttactgttgcgcttggttgactctccaaggttcatgaacgtgttgcggaccatctcttctgacatgcccaatccaacgtcctgcacaaagaagtatggttcaaggtctgtaggagagtgaatgatgatcggtacatcaccccgtccagactcaacatgggagtctacagcgttgaagattggttcacggcagcttgccagcaccttatcttcgtaaatccctttaatgattagcccaaaagtctctttgttcagagaaattgagccactggtgacctccatatttccggttagcactgctttagtttcattactgtttacaatcatttattgcgctccttgtagtagatatggctcccgaattgagctgtcctctgcatcttttttgcccatttcggtcgtactttggttgtatggtagtgtgttgctccacctgttatatccatagccatgtatgcaacatggttgttattatagacctttagaagcatctttgcaagacttttagcgtgatcccatgaatctttttctgtcaccttaaaagttttgccgtggtttgtccacgaaaactggttaggttggtagacaatctttcttatagtgtctgggtatttagggtgagatttcctgtttaatgtggcaaacccagatgccagcatacccatcgtgccatcccctctagcttccctgtagatattacatgccaaaatgttttccttagtatctgagggcttgcaagtatgatatactttttgttttggtgctgcaacaacaggcagcgataaaaatgcgctcaaaataatagcaaagatcttaattttcacaataactccaaatagaaaatccccgccgaagcggggtggtattagaaattaatcgtagtgtgccaaaatctctccatcgttgcaagttccctctacaaagttatgaagattcatgcactcatcttgatagaagaatttaccgcttttcagccgtaagccaaacaactccgcatctccacgatggcaagcctctacaagttcatagatttcatacggcaactctccgtcgtcatggaagaacccagccttatcgttgacatagatgaagaaataatcactgctatcgcaagcgtccaatattttaaaccagatttcatctacatctttttctcggatatcgatcacgcaagtggagctgcattcgtactccttctccggctcctcggtcaataccaccaggtagtttccccgcttacctactttagccatacaacctccttaagctttagccaaaatggcgctaaactcttcaccaaactcttttacaatcttcatcaggtttgggtatgctttgatcagctgagcaacaatcttgtcacgacctttaccgataagcaaggcatttcctaaggcattaggtttcatcatcgccataaagactgagaatacaaaatctcggttctcgtccttgaagttttcccaaaggaaatcgaggaagtttgccacacagctaacaagatcttcgtcggagatacttgcattttccatcatattacgaatagcgatacaaccttcagatccaagaatccacaagatgtctggctgtttagggcctacgtattctttgcaacctcctgccataatccgaccgatttccggtaagttgcgtttcttggtgtggtaagtccagatctctaccgctgcagtgtgaccaatagcaccttgtagaagaacacgggccatagcgtcagaaataataccgctgtcaaaatcgtgcaagatatcagatgcagcaacccaagatcgcggtgtggcaaaagatggacaattaatctcagccatggcctcataattatcaatagctgatggaactcttttcagatatccaattacagaggagtgcaccccattaaggaatgcgtagtcctcaataaacacctctgcgttgcttgtaacttctacaatgataaagcggttagccagaggggcttcgagcgccgaaagaacagcaccatctgtagaacggttacctgcagctacaaaaacagagcccttagggaatgcataggtgccgcacttgtggtcgagcataatctgcattgcaaccttttgcaggtagttatctgcatgagtgagctcatccagaaagacaattccgctccagtcaggatccgcaggccaaaattctgggattgcaaacactgtacgtgtagtcccatccgcttctacagggataggtagcccagataagtcggcaggatctttatctgacagccgcacgtcaaccaggttgtcatctcgctcaccgaacatattatcagcgatctgcttcatcacctgactctttcccacacccattggtcctaaaatcaggacagatcggttatgacgctgggcaaactgaatgatagctggcaactcacggacagtgatttgaccactttcaaatacgtttcttgacattagtaaaagtcctctacttgtgtgtaagtgttttcaaagttttccaaaacagatatcacatcggatctgtcaatatcgtacacaacttcccagttgtatgcaaccctttctgctgttgcctcttctggcgctagtcgtctgctggcataaaagagtgttggagtacactttcttgcttgccctctaactttcccataataatatctgtgaatatctttgtcaaaatttaactctttttctgcacgaagttcatattgctggtataacatgtttattactcttttaagtggcatccttgccactacctgctagaatacggtccgaatccagacaaggttcttatctgcccaatcatagaggcaagtcattgcactgttgaattgctcacacggaggataatcttcttccatctggcgcatagcagagccttgtgggtaaagctcctgtgctgcaaaccacgcgtcgtagtcatcaacggtgtcgaagtagtatacaacatcctccaactcaggatcgaactttgaactatcaggatccagttgttcagggaacttggagcgtaacttgccagccacaatacttgccaactcgctaacatgcttattgtcccactccactagcttcccgtcttcagtgatgcgtcctaaccactgatcatgaaggtcaactgttgtcttccactgggccattatcagtccacctcttcttctcgttgtagttcaagatacccgtaggtctggacatcttcaagggtgtggaactccccatctgccgctaatgcacgaacaacttggcacaaaaccttatgaggaacttcatccagaccaagattcagtgcagggaacaccttatctaagtcaacaaaataaatgaactgtagctcaccagcttcaaaaggtgtatcttcaataaacatcttctcggcattagtcaagatctgcactttcattattctacctcctcttctttttcttcggcattagtttcatggctaccccactctggagtttccacctcgatagtaaactcacgcactacacggtaattgcccatgaagcgctccacttcgtcaaggcttatggagaggccattggcaaccaggtctgcagcaccctcttctaccaggtagtccagattggcttccagagcttcaggttcaaaccctgtcaatgcaatcagataaccttccccttcatcagggaggacaatacagcccaattgattttctttaaaaaggcagtgaccatcattattgattgggtgttcattgcagtaaatagctgcacgataagtaactttagacatcggcaaggtctccttaggcaattgtcattttacattcttgaaattttaacacaagacggtgattgtgtctagtgtctaaaaagattttttcaaccatcaggcacacggtataaccgtccatcttgttgacaacaaaatctccagggtaagggagggtgtcccctgggctgggaaaacataacccgctcagaaaggcatcatcggtggtggacttaatggatttccacacactatctgcctgaacattctcaccaacataatatacactaccacatgacttcatcatagtcaaatctccgcgtaaattaaactggaatcagtatacttctttaatgggtaaatatcctgtccatagatgcaatcattaaacacctcatctacccaaaggctacacttatatcccatcatttctaaaacacccatctcttcttcggtaaacttatcaccgctcttgcaagatgtcaatacctcattctgaactcttgctacctcgaagcggttattggcaatatcgctattggcgatcaaatactcacctagagggtgtgcggcattaaagatgcacagtggacggctgacgtaatagtctccgggtgtataaaaattgttgaggtctttcactagaacattcttatcagtcacttcatttataacatcatgcatatcgcacatctttatatgtttgaggattccatcccccatcacaaaataaaaacttgctgagacactttcggcatagatcttactagatccgttgtagttgtattttactcggatgctaacgggggtttttcctgtcgcgttagccatcatccaaagaaatggcagctcatacttctcctctgaggaaacaaaaggtgaggtagccagagatcgaaaacctccagagaagttgaaagttacagaaccgcttcggcggtatgataccgcgtattctacttttatatcgacatacccattggaataggtgtgtccttcattatctaaatatgtccacttatcagacccagataccaatctacgctcaataaccttcatcactataggaattagtgggttggtacaaaccgcttttgaagtagctttatcatctaaagcctcgtaaattgcagaaaggatgtccccagctgaaagattggttgttatgtcctgtttccaccgcgtactaaaactgttaagatttgccatgagtgagtgctcctatgttagttttctttcgaatgggtacactatatcggagatttagagtaaagtcaacacgtttttgatgttgacatctgttgagacaattgataagatttcttcacttacagagcacgagagacaactcatgaatcttgaaaaatattatacaccagaagagttagagcgcctgctcaaaaaatatagacgcaaacagaataatgcacggaaacgagatatagagttcgacctgtcgtgggaagaatacctactatttggtaaaaaacttttaggggaaggggtatgcgactacacccttatacctttcgacatgcacacagatgaaaacggactgggaaatcctttctatccatctctggagcggatagatgatgaaggtccttacgcaattgataattgttgtgtggtagggttgaggtgcaacgctctgaaggactgtctggtagataaaaagactgcaatattgataaaagacaaaactgatcgaaaaattgtccagcagatgatgctccacctgagcgaagagcgtatggagaaattgaaaggtgattatactttcgaagatttcatcttgcaatacggggcagaagaagataaactagcactttttgacgaagaggaagaagatatgtcaccaatgcaggactttaaaaatttcatggctgatcgtgcagccaacaaacacatttcagatatcgtaaacgaaactgtgacagaagaaattggagaacagaactctgaagaggaaaaagagcctcaggaggtcgaagaggagattgcagaagaggttcctgcactgcctgatgatgttgaggttgctaaggcttacactttctattgtcaaacgttctacgatgcaggtatgaaagttgatctgtcgttcagccaatttaagagttcatatattcgcaaatgctgtgctttaactggtgaacgtctcggagctggacttaaaccgctgttggtgaccgactggaataaaggtttcactaaaggaaactttatggtagtatctccaattatggaaaaagccatgacagatcttatgaagaccactcgcatgacaatgactgagttggcaggtattttcaaacacgttaaataatgacaggggccaatggccccttctggagttttaatggatagcagaagttcagaaatcgttgcctcacagaaagatgatgccctgagaatgttgcaggctgcacgtatgtatctccttgaaaagctgccgttttatggcacactactgtcagggttgcagttcgtagaaaaccacacatggtgctccaccatggcaaccgaccataaacgcatctattacagtcctgagttcattatgggattggctgatgaacgcaaggctattcttaaggcttctctaactgacgagcagtttgagatggctgaagttttctattccccaaaatctgtgaaagaggtggccttccttctgtcacatgaggtggggcatattatctgtgatcacctagtccgtggtaaaagctttgagccggaactgttcaatattgcttgtgatcacgttatcaacacaggccttgtggttgactttagcaaacctccttgtgttttcttcccgaaggggaaaagcactacgttcgtgaaaggtaagccttttggcttcttagccagctgctactgcgacatgaagtttcatggatggattgctgagaacgtttatgcagttcttgataagcaaagagatcagaataacggtaaaagtaagaacggtaaaggtgagaactctcaaggtgataagcgacaaaccgatgatcacatgagtgggaacggtggcaccagtgataatcttggaaaggctatggggtatgatcagccacaacctgtaatcagccaatctgataaagatcaggccatgcaggactctggtgatatgctggaggcagcaatgcaagcgtccggaggccgttgccctgaggcggtgcgtgagtttgtcaagaacagaggtaagcctgtaatcaactatatagacatcattaagcaacgcatgttgtctaaaagaaaggccgaactgacctacagaaaacctggtcgccgatctgggtctttgaccagcacaatgcgaaaagttggggctataaacaagaaccagcacgttattgttcctggtcgtaatccggaaaacaccatagatattgtggtggctttggacgtttctggttcgatctctcaaagaactttaaagaaaatgttcaatgagatcacaggattgtgcaatctgtataaagagtttaaggttacaatgttctgttggtcaactgaggttggagaggttaaagtatacactcgcggcaacatagacgagatgatcaactatgaggtacactcaacatggggcacaacggctgcttgcgtgttcgagtatctggatgccgacataccgaatgcaaaagatgtcatcgtcctgaccgacctatactttgagcataactttgaacaaaaggctgttgacaacaagtggaaaaagtacgatactttatgggttctaaccgaagggtataataaaaattatatccctagctttggtaaaactgtggaattaatcgagtacgctaagtaagagaggatgttatttatggcaacagaggtagtaattaaagctgaacgcccagttaaaaaagctatcaacacgttccctgtgggaaccattgtgagcatgatcacagagtcaggtcgtgtatctacgctactgattgtgaaatctgcatgttcttcttgtgtgtgggcttacgatctggacgagaaagaactaaaatattttgttggggagctgaaagcaaccgagctcgatgctcgtatcgaagtatttggtgaaactatggaggaagagtaatgaccacgaaaatcactattgcagaaccgaaagctaacacgcaacctatcgaaaaatttaaatgtggtgaggtggtaacatttacaccagataatgaagatgctaagattttcgccatggtcacagctgagtggatgtgcgacaataccacacaggttctgcgttttgacacctatcttaccgatgaaatcaggaacgacaagatcgtgactggtgttgatactgaaattattttctacaagagctttttagagggtttctgatatggcaaaaattcgtaaattatccagcaatcaggttgtgaaagactttgaatctggagagattctgtatgttcgtgatgcagatgacgaaggtgaagatcttgttatgttggtggggcacgctgaggacggatgcatccaggctgtttttcttgaaacagctatggtgcactggatagagctggacttgaaagcacgaaaacctaaagcagaaatcctgatttacgaagattaacaaaaaggagatagccgtgttgagcaagcgtgaatgcgacagcattagcctgaattcttataagaaacaatggtttggggtagaagtttgccgactgcggctaggctcctacctgaacttcgtttattatgagagcgatagtcgtatcgtttcttatgaagtgttctacactaagaacaccttcgaactgcgccgtaaagtggatggtgggagaactaccccccagaataattgggaaactatcctacctacagatgttataggaagtcccctgaatgtatctgaagatgaaaatcttatggttcatgctatgatgggacttgacagcttagagctggcgatctatgatatgtccatcgaagcagttaagctggactacatcgaaaacactttagaggaaggtatcaagaagtttctcagtgagaaattaaaagaccactttcataaggagctatatctgttatgaagacccgtaaagaacgtaacaaaattttacctggagctctcgaacacctgatgaagtgcagatctatttggcactctgccaaggaagggcagaaggtggttgtggttagtgacaataccaacccgtttggagattataccaccatgatggccccatatgtccgtgatggcgttgtagaagtggtcccttacaacggtttgcatgaacggcactttgaaagcactttgctagtggagctatagtcatggcggtcaatgtggcttacaacacaggaaagcttgacagagacattgggtgtcttgtcctttcagatacagaagagtattggggctatgggttgctgtcagacccacacccgagcaaccttgtatcaacggtgctataccgctacgaccccgtgccaactgtacacgacaaagacattcacgaccttcggatcaagtgtctggaagatctgctgaacaatggttgcaatgatctgcgggtagccaaagagaagcttacaaacattcacaaagaggaagtgatgagcaccctcagtaagagatcagtgcacaaaaagatgatgctgaactttgcaatgggtatctacatggatgggtataagggcggggacccgattctcaagcttcgctgcccaacactgtgggaaagggtggttgacagtaaggacggcactgccctgcttgagcttcacactgcaggttggatatggcggtatgttgatggataccctctatgggcatgtgggcctggggaatttgttgacaggcctagtgcggtggtggacttgctattgcagtttgaataaaagtgagatataaggtgttcatgcacctaccaacaatacaacaagagagactgagatgacgaaagaagaagctgacgtattagactttgcactggaggctacgcaagaggctctggtgttagcttggaaaatgaaccagcgtgctgcagaatgcaaccgccgaatcaatgagattctgggcatgtctatgtatgatttcactatgcatgccggagagattcctgaattaactgcagagatgaatgatcttgacaataagattaatatcattctgaagacagcagaaacaactcaccaaaccgcccgtaaatttatcaacgagaaggtgtgaatatggactacagctactgcggggaagaagttccttttaactacagtaatcttaccacaagcaatccatacgagactcgccacggcacacacatcattgccattgactttgatggaacgtttaatgcgagccctttcatcttctcccgcctgatcagggacctgaagaaggaggggtggacagtataccttgtgactttccgattcattactcaagacaatgtggacattgagtattggcgcaaggagctcgatgttggtgtgttttatactggcggtgttcagaaggcagcctacctggcgcagtttgatatctacccagatatctgggttgatgattctccggcatgtattccggctaaaaatcagttagagtttgcaatgaaggagattgagtacaagtttgaggctaagcggaacggatggccctttattattgaagattacccagatcctgaaccggagaaagagccatgaggcgaagatatcattacctgatgtggaagttatatcatggtgctgctaaagcttaccgcaccgtgtttggtaatgacaatcactgcattatgttacaccttaccgccattgaacatcacaatgagtggattcgtgcaatcgtaataggtgacaaagattttaagtaaagtattgctttctagatggagactgattaaatgtgcaagtgtaaatcctataattggaaagtgaaaggtgccaagcatcaaaatgttatcgttgatgtgcctaaaaagctccgtgacggcaaaaaacgtgtgtgccttgataagtgcatggctaagcctatcatgagtctatgggcggcaggattgaaaactctaaactgctgctgtggtcataacaaagatgttccaagtatcattatcccagaagatgcagaccctaaagcttatgccaaaatactgacccgctaccccagcaccttcctgatcggaaaatggtgtcacgatgaacttcaatggtgggtagcatacggtagtataggcactgcttttggctttccagctctgtcagagcgctacgtcaaagtgtcataatcgattttaaggcctcaaaagaggcctgtgccttcaataactccaccctctcttgtgattacacccacctttcaaaaaacttccccaaaacgcttaaaaaatgttgttgacagcacacaccccagtttgctattctcattatcccagatacagaacggagtaacaaaaaatggcacatgtgaatattaaactacattatcatggtagaaaaccaaaatatccaatgcataaagtattttggggattgcatatccaagaaaaagaaggtattggttactggttttgtgaccacgatagacaatggcatacccatgaagaagtgtgcactatgatggagcagggtattaaatttaatttctcaaactatgatcatggtgttaaatgcattcgaaaattgaaacgatttcttagaaagaatcctgaacttaaagggcttacattctttatgtctcataactacatggggtatagtgctactgtaactgcaaggattaagtaatatgagcaaagtaaaatttgttaaatttaaaaatcctaacggaataacagcccttatgatgggtgtacactttacaccgggcaaagagtatgaggcagatgtatacgatgggatagatggtaaagttgggataggtgtgtggacaaaccgtggagaaagatactttatcaaggatatagatgctcactggggtatttgggaagttgttggagatctgtgatgatgaaatgaaatactgtttcttcggcaatatgtaatatagattggttaaatatggagactgatagagatggctgatttttgtaaagactgttctgaagagttgtttggcagtgactgcggagatctgaaaggattgatcactgaggatcagtggaaggaaggctatgcagcacctgttatttgtgaaggctgtggttacacctatgtcgatcatgaaggtaagcgtgtccagccgtctgaagatgggtcgtgttgggaatactactaattataaaaagaaaggggccaaacggcccctttttatttaccccttgttaacgagaaaaggttgcgtaggcttctagacgatactgctggtcaccagggaacataacacctatagaggctgtccctagaatcctgccttcctttccagactccattctgaaccctacccatcctgaactccttgcagcctcgatgttgtcgctatacccgaaagtggcaagatcgtcaacaccagccccaaacagcaactgaagctgacttctcggaagccctataatttcaggaatatacgcaccaaagtacaccatctgccctaccttaggaccgctgccgtactccatcggtttgcttgtagagaaagtcttcataccagaagtacctgccggattagggtatgccccgtttgttgctgtacctatccacattctccactgtggtgccatctgtttgacagtaaaagatgttgaagacgttttgcgccctgcatcatctgtaactacaaactttatggtgacattcccagtagctttaaatgttaccagtcctgtggtggcatccactgttgcaatgttggtattactactttcccaagtctttctaatcccggatacgttggaaggggtaatagaaggttcctgcatctgcagtttaccaccaacaatccctatgccgttgcccggattatacagcacaccaacctcgtctataatgttccctgctttgagactatacttccttgagaagttgtaggttccgttataagtgtgtgtccctgagaaggtgacatctgccttcccgtaagagatgcaaaccaaagcatacttcctgtcaggcaacgtttctccagtctctgggtgagttttacctacctggaacacactcgggtcagtagagtcgtgactatcactaacggagcttggaccgcccatcaactgtgacaaacaattccttacccatgtccagttattatcgctggagaagtccacagtcaaatcaaacacaacccactcatttggcttccacacaggtgttgtaatggacttgcctacaccacctccttggagtgttgccgactgttcagtgatcagggccgcataggccagagttcctaaactcaaagtctggcttgctgtcctcactaccttagaatcagcatctgtgaagttgttgatgatctggaatgtgccataagtgtttttacaggtaattctggcgttcagcgtgtcaatcttcctcacatctgccatagcagtgttagacacagagaagtcagaagctttagctgagtttgccgcaacagcaggatcaacgttaagagttgcgttgaactgacaggcaggggtaaccagcagcttgttatcacctatttgcttccatgaaatactttggacaggtagattccatttaatacctgagaaaactttagcaacccttggccccaaagctccagtcctgttgtctttacagcacatagacatggtgatcgttgacggagtggcctgaccaaataattgctgtgcttttgcagaggacatggtgtagaaattgtccttaacaaactcatcagcggctaaagatccatcagccctccaccactggacctgataccctgttttatcccagcctccaacctgcttcaagtcctcccaagagatttccagatcccccgtggtagggttgattgcagcagttcctggtgtaccggatgaccacaatgggatatcaaaccacgcaggtttaacagattgcactgcattaggacctattgcagcagcaagttgttgacccatcagcacgcgagcatctttcaccaggccccattctatcatagacccagagtaaccttctttcttgtaggcagaggatccgttcaaatggatgagcctgctgcagtcgaagccatacgctccaccaccgttaggatctgcaaagttggttatgattctatccctaatatttttccatgccctacctccaatctcgtagtcatggtcataacatctttgcaacgttgtccagcaaatgattgccattcttctgccgcctgtgaacccgaaagcgccgtcattcagctctttccacaggtaacagttggttgtccacatagccctgtggatattgaaccagtttatagatttggctgagttgttccactgagtcccaggtaattcaggccacactgcattgactagcatgtcctctgtaccggcatccattaagaagcctcttaccttcttgcccatacctaccctgtctttagcaatccaattgccaaacagtctcagttttggaccataaacaacatcctctgggtgctcaaaagagacatactttaagtagattgttgggtcaccgtaggtgccatcacaaacacttttgtgcatgttttcgccaaggtctagacgaagccccgtcactactttagacgtgtcggtgaatttgtctgttaagtcaaattcataccaccaccacccaccacctagcataaatttcttgcatcgcacagcgtctgtgtcagatattctcttatcccctgcaaaaggtgaatcagcaaactgatagtgcagagcagtctcaaataggtgggtggaagttccgttctctgcaagaacttgcttacctatcagatcgcacttaatgatcatcacaacacgcttgtatccgtttgttaccggaacttgcatagatatggatgttccatccatgttcgatcttagatcactcatgatgatataggggtcgacagcgttgcctaaagtttcaggccctggaattatcttgtatttcttgacctggcccataaatctgtcactggcgtaagttgcagcctcaaaacaagagccaccaccaggtaattctccaggtccccagaaaaatgccccatagcagttatagaaccacttattagggtcgtatttgttcttgaaggtctggacctcgttggcctgttttgtcaagaaaacctgcgtatctgtaaagattgcaggatttacccttgcctgacgcggagggtaacctgtagtttggttaaaccacaaattacaagagtaatccctcatatagtcataatcagagtatttgtttacatcttcgttccaacacatgtttaggttggtaccgcccatgcatacaatatattctgcgacatacttatcacttctggtaggaatacctatgaaccatctgttaacaggctcatcccaagctgtgcgctcatctttaacgcagatagcaatccagtcatgtgttcctgttttcttgcacacatctcgcttcataccgtagtagaactctttagtattcggctcaggtgcatttatcagataactccatgcctgatttgcataagtcccattggtgcgcggatcatgatcaaaggcatacatgatgatcctttccccaccaagatgttcgccaagagtaactttgacattcacatcgccgtaaccgttgcgaacaacatctatgttgtcaatagagatgcccctaggggtgtaggcaattttcagggagttatcctcactagtgccaccaagggtgatccctatgttgtttgttgtcccgtcggcatatcttactgtggcttcccagcgtattccgaaatatcctgcatcatggctaacaattttcagtgtacgagcaccagagttaggttttccaggatcaggccaaggatctggatgttcatggacagtcaacgatgtcccgttttgctcgttgacctgcaacattttaccgcctctgccgttagggttgaactcccacaaggcttgtgttttcacaacattgtcatacgtggtacgtctctgatcgtagatctcctgagtcacatcgtaggttacagacccggcatccattctatggagtcgtactatatacgatgtatcgccttctacagcaggttgagctgcgttaagcccgaagtatacagtatcgttgacatggaactgtttgtttctaccgacagtatgccacttgccgttggacggatacgcaggaactatggtgttccagttcaaagtccttgtcgtatgggttctgcctgtgccatgcttgtcatgataggttatttttacagagtacaggccacgtctgttaacatttctgttatactgggtaacaacaacttcgttggccccgccgtggttccagttggtggagaattggtaatttgcatctgtaacaaccgtacctgcagcatttaccagttcaatcttgtcaataatgaacgtagccccctctggctgaggcttcaacttcatcttgaccgtgtcaccaatgtaaatattgctaacgctgctaacaccgttaacgtcgaaaatatcctcaacaccccaactgtctaccgggacatttttataccaattctcaggaacctctgtgaacccctggctattaagtctgcctccaaacaggttgttagagcctgcaaaacttccccttgggatgcctgaccaccaaagtttaccattaacaacagtaaaggtccctaagaaaccttctctatggatgccttggaaataaacactctctgtccagctaactggcaggcgttgctcaacatatttagctgtagcaagagcttgatagtggataaaatcagacctaggactattgtttgcagattgtgcaccaatatcattacacaagttgcgagagaatccacgatactgcttggtgccattattgaagaaaatgccacttgtgccgtacccacgagccattattacctcatgggtgtaggtgatattcagttcccgccatgtatcatctccccaaatgttttgaccataaaatacgttaacaagctgctggtcatcgggtctatgcatcctctgtgtggcaattattgccccgttaggaccgcacataaaccctttccactcctcatctgcaggaatgcccctcaaatcgttacgagtaatctgcacaggaggccaaacaaggtcgtttctactgttatttctcagaaagtcgtatccagcaatccagaaacctctaggaccaccgaaaataacagagttgtcatgcacctcgcagttgatgcttgggtttttccaaggacctgtttcaggattttccgatgtctcaccaatctttacaggggttgcatgctgatttttgtcaacatgaagagagccgtaagtattattgccagagccgtacaggtgaagcataccatcagcctctggtgcagcaattacccacactgtattgtttacgccacccattacttcaacaagtctctcaggatgggtgtccaaatgcaaccctgttacgatctgttccggcaaaggtgtccactctctgacacaaacatcgtttccacctgctgcctccgatccgataagaccagctgtgcaaccaatatagaaaaatttattatcgaatgtgcggattacaaatgcacggtcagctctccaaacatggtctacgttccaagctgcctcattaggatagtttattgtatcaagatctccagtccgacactctccgaacctattatagccagtaatattaagctgaccatcatcaaaaagtatagctaagctatttacataggatactgtgttgcttgtaccatcactgttgtctattgggtatgacagaacagcaagttccttaattccacccctcttatcgaggaaatgacgaccaagttttagcaaagggattggaagcattgtgttctccagataagaaaaccgccccgtcaggagcggttagatatatattaacgttgtgcaattactacgtctacgatatcaccaacaccacaatatgttaattgcagcaaggtaacactattagccttgttattaataacaggcgttgccgacaggatagcatacttatcgtgcaaagtcacgttgtgacctacagcatcctgaatgacatagataaccgcagtgaatggataaggtttatcttccgctgatgtaccaggccattgtcctattgtaaaatcccctttcgcgtggacaacatacatactggcctgcccgttaggtgtccatgtcccactggacgcgtcaacctcctctaaatcaaaatctacctttcctgcgtggaaagtaggggcagtaatggttttacccgcctcaatttcttgagaggtggttatcttgccactggagttaatgccattacaaacaaagttgacattagagaagtctggcagccacccagtcactgtgccggatatttcaaggttgtgaaggtaggtggtgcccgtccctgctgcgtttaaactaacatctccatttacctgcaagtttctggtaacgttgcagttttcagagtttgcagttgttgcagttaaagtagtggttgtcagctcggtaattacacctttgttggctgtaagcccttccccttcaaaagttgcacgctcattgactcttagggtattcagagctatgttttggatagaggctgtacctcgaataactacagatccgccaacttctaaatcaccatttattaatgcgtcccccgtgctttcaatatagctagggtaaatcatggtgccatcgacagagtaggttatccctgtaacagtgcctgtcacctcaaggttcttaaccctggtggttccatctacctgcaatgtcggttcggttgctgccttcatggcattaccacgaatgtacacgtagtcaaaaaagttattacctagaccatcaaaatgcacatcgttattattagccactggtttcccagaagttatagtgtcagctataaccctgtgggtggacacttcatgaggttgcagctctgtgcttctccagtctgcatgcttaggatcactccacgcaaaagtaagtgtagaagtatttgccgtgaggattaggttcctgaagcgtgcagtagaatctgctccattaacaggcccatgtaaggtgagtgtgccaccaactatagtgttagcaagttctgtaagaccttttaccaccaaagaccctacagtaactttcattccctccatggcttcaaatatgctatccacatagtcaacaacaaactctgtgtttgctatagactcggatttgtcgtccattggaggcgtaggtactcgcgggtcaccttcgaacctcggactgttaagttttgcgtagtattttgccattactgcagaatcggtatataatctccagtttggagattgtgaaggatctgctggcattctaaccgggttagattttgatgctgcgggagcgtaccaccactgagggcctgtgtcccctttaaactcgtacagctggttaaaaactgttgtggatgcaccatacgcccaagggatcggtggcgttttaaaataaagggtgtcaagcatggcttttcgtaccgtagggatggtggtcccatcctctacgacaacttcatccacagcgttaccgttgacaatcaggtgcaaacgttcagaatcaacaattacttgatctaccgcctgctcaaagcttgtcatgtcttgcgccatgatttctccttaagctttttgctcttcgtttttaacgtggtcagggtgctggcaaccccaccggagcgagatgaatttgctaataagctgggggcaagctactgaaggcgcgtatatccacgcataccattcaggaagcgtatcattataccccatatgaataaacaccccagtcatcaccgccatgcctatgtttgaccatagcttagattgggacactttcgtagggtcatcagatgccgcaaccagtccccataaaaactgagttagtttcatttaccctctttttaagcataagatatagtgatccattgaccatttacaagtttttggatagcacctgtccagtaatcaccttgataagggtgtttataagcgtagttaccagagcacatcacatgtccagggtagactcttgactctctgtaggtggttttaaaacggtttgctatccttacatcatcaacccctctgctaggcatagggatagtaaggttaccgctactgtctgcgccgttaccatttaccctgcggaccacgtttcttccaccaactgttgcatattggcccctgacggtttcatcgttacaatcaactcttccacctatttgagcgcttccgcaggattgttgtccattaacagtggctcttggtatcgtgaccgcattggcatttgcagaggaactttttgcatcgttgcattcaagatttccttggatagccagtcttgcacggttggcagttatagcattgagcttcatagctgaaaacacaggctgcccaccagaaggttgaaatctccaacggaacccatctatttggtgagaaggatcatcaaggtctgtgccgtcagcaccaccgatgttgtccataatccagaaatccatcgtcgtcttgtctggagttatggtggtatatattgccgcactgtctgttgacgcagatgcaaactcgattctttgaagacctaaagtttgagtctgagtcattatgtctccagacttgtcaacatacagatcgtccatttcttcaggcgagtatacgttgagaacttgacgtgcagcagctttgtctggaacgtctgctagattattagtgacccttaagaatctattatcccatcctgggacaacatcttctgttagatgctttaaccacgcagaaagcatgtgaagttcaaagttaacaacttcacatgccactctttgtgtcatatcccaacctttcaatctctcttctttttttggttgagacttattcaactctcccgtattttcaagcacaacatcctgattggcccaaatatcaagagggataactggtttagtcatcgcgttctcctgagaaaattccttaggactattttaacactttagagaacaaaatgcaagaacggagtcctttccgttctgacctttgtttaccttttactatgctctacgagcatgtgcaaaatcttttgtacatcagctcggatgccggagacatctgtcctgacatcctgcttaaggtcgttaatatcggcctctagcttgcttaaccgagtctcgataacggaatcaagtctatcttttgtaaccatactgtttttcactaagatgaggtctttctccagctcatccaacctcttggaaatgcctttccatttggtgtgccactggttgaaagcccatacacagatcgggacaacggtacccatgcagataccgtacaatgccgccaaatccaactccacaacacctcctcttagagggtaggtcgctccgggaagaaaatgtcaggggctttagatgtatctatttcaagaagttttaccctgtacattttcaaatctctgatgttacgtttctggtcatcagtaagatcatattcaaggtcaatcatgtcttgataggcaccaattctagcagtagcccaagcaagttctgtctctatgacaccctctgcctgttgaacaaagaattcattatctgtgacaaattcatcaccaactaaacgcaaagcgtcgtggtgaagcataatgttttctggtacctcttcttttttggcgataaccacacgaagacctggagcaggccataaggcatcaggttcttctgtagatgtcttaagaattcccttctcgtcaacaagtaggaagatacaacccggattttcttgtcgtaatgttcgtgactgcacataccaatcgccatcatcattacgtaaaaaatacccagtgtatgcggtgtaatcctcaacctcttgaggggtcagctccttggtttccttgttggagtggtattcgccagatcccggttggtaaagtttaaactcttgaagtattttcatgctagtcctccgatctatgcataattaacagtgatccattgaccgtttacaagtttttgtaaaggtcctgcccagtaggttgaaccacgcatctcttttttgtcaccgaaatgccagcctgtgacaacgtagccgttgcgaattggagattcggaaacgccgtcaacaagtcttgcaccgattctgatgtcttgcacacctgtctgcgggatagtgattgttacatcaccgttaccgttagccgtcactccattcacagagcgcaccacatttctgttaccgacaacacagtgctgacttcttacaaccatactgtcacaacttgcacctccattaacatacactgacccagtcgtcaactgactagccacattacagttggtgaatgttgctgtattgctgatagtaaggttattgcacctcatgttatcgacaacttcaacattgcctaccactttcaacagcgcacgattagccgtgatagcgttaaggtacatcaaagtgaactctggattaatatccggctgggttggctggaatctccaacgaaacgcatctactgtagatgtaccaccatcatcaaacgacccggtattatcacttaacccaaagtcgagagttgtcttatctgggccaatagttgtctctatccaagccttatctgtctcggcagctttaaagttgatacgttgcaaccccaaggggcctgtcattgtatcacctgtaacttttacatacctggcgtctgcctcttccttagtgataatcccaaggtttctacgggcaacagggatgttcaaaagatcgctcaagttattatcacgtaccagataacggccttcttgagcggggatctgctcgtcagcaatgtattttgcccaagttccgagcatattgaaaatatagttaagttcttcacaggatggcttttgaccaagatcccaaccttttctccacaaatcatcaatcgggcgtagcctgttctgtctgtgggtgttaggcagaacctgatcctcctctgcccaaatctctaatggaaaactaggttttgacattttatctcctgattatgagaagtctggagggacaacatcttctacataccctttcagagcaacctgccccatatgaagcacggtagaatctctggctgtaacagtgatgctgtcagacattacttgcgggtatgcccacacatactgttttacctcagggtatctatactctatggttgccatgtttccgcagatacatctccataaaaattcttggtaattcctggttgggtcgtagccatataccggagcaagctctttactaggaacgaaccctgcaagatattgtatttcagacggttgccaacctaacttaacgataggtatgtttacagactcttttgccttttcaatacctccctgcatcacccaatcgtagcactcggtgcagaagaaatcaagagcacctgcttcctttttatattggtcagcaaggttcagcttttgcgtaagctcggtttccatgatggttgggaaaaacagcaaagctgtcatctgagctgatgcagcatgtgcctttattgcctttgaaatagccgcaatacgagcgccaagcttaccacgacaaaatgctacatacttgtcgtaaacaccgccagttttaggatcgtcaatagtcccaatatctaatgcatactcacctgtctcatcataaaacgcctgctttgtagggtaatcataaatacaaggtctacgagtatcggtattgtaccaccaccacggttcaccaacctgcataatcactggcaggttgtttctcatagcggctgatgcaaaattcttaaatactgcagtaaggaaattcataccctcttcaatggttggagacaggaggtagctacagggtgtataccctgttttagcgtagttatcgttccagtctctttgggtccattccaacgggcaggcatcgctgaaaagctcaaaacttacagattgcataacgtcgaagttatgtcgtttggcattgtacataaaatcatcatgccatttataagctgcagcgtttagcgcccctgttctgtttatagaccattgggttcctgaccatgtgtagtcataataatgactcataccaacataatggtttatggttccggtatagcccagacgcttgatattgttcaacacccttaaaggagacacgttccacatatcgtcatatgcggtgcagatcccaacatcgtgctctctcacctggatattgttaagttgcatcattttccagcctgtgtctggctgaagcagatctaggcgcaactcacactctacattttccgttctcgggtctgtgctattacttacccagtctttaggcatgagtggtattaaaatccttctcacctgccgaggatcaacacccatcatgttgttgttctggtccatcccgacgcagtcctcaaaatcaatatgaatttctgcaacattcttatcctctgagatgctgacagcatattgagctaaaggaacatagatgattgtgccatcaacaaggtctacagtcataatcatcttttcaggagtggagaagttgctggcgttggttattgacattctgaaccagagcttggtgtttctcatctcatagtgatcatcaaacccaatgccgaaatggtcatacttgtcaactgtttcccaaatacacccagccatacctccatatgttcttgacactaaacggttaatacaacagttgttatctgcaacaatacaggtactttcagtctgctgagtggttgtaacccaatatcttgggtgaaacattctctcctcaacagtatcccaagatatcctgtcaagattctcatctgaaactattgtacatttcgccctttgtgttccaatcatcaccccttgagattttgatgaaaactccataaagaagcttcttggcaacctgttgggtaatttgtcaacaatttccacggggatctcaatactggttgccccaactgggatagttacatcgccctcaacatgatcataatccctaccaggaacggcagtatcctgaactgttcggtaatgaaaccgtgcagccattgtagagtaatcacggtaaggtttaaaaacagctgttgccattaaccctcctgtctagttgcgtttactgtaatactttcacaataaatggttgtggtgtcccaatcaggtcttacgtcaggaacatacagcaaagtagccagcccaccaactccaaactggttttcttcccatactgatccgaagccaagagctgtagagtccccttcaaaaccaaaagcttgcccttgcgattctgtaagacgcaaatgacaaggcaatggtagcatatctaagatctgatcgatagactgcaatatgtcaaagcaagtttttctaatatttatgtcaaacctgaagttgtctcctttccacgtatcgaaattgtctcttccaaacaattgtcgcaaggtggagatgacatcttcgcgagtcccgccccttgatgctgcggcctgctgaataattagtgtggcacgaaaatcagcatctgaaagtccattcctaagaataccaagttgattaccaacttcgtcaaggtatcttccgctggcattgttaagcaatcttccttcagccaaacctaccagcatcttatcaacatcctccaacctttcaaggtatacggttaagaatgtgactaaattaaccttctcagccagaaaatctccaggcaggtagtcaagacctccctgaacaaaatctggcagagtgtggatgtggttaacatccgacttaatctctgccatatctcgccgccttaaatagtttgttggaaagttatattactttcgtcgaggtcaaacacctcggtcatgttcgcaacaatatcgtttgtagtgtaagcttcatcagaagctcctacggatttaacttgaattaccagcctattaaatctacctattgacacagcagcagatgcagcacctaccaattggatattatacaacgtatctgcaacatccagtccgttaacaacctgcaaaagagcctctataatggcatctttttcggttgtagaaagcgcagcaccggagtaggtaattcttacatctaggcggtaggtgtttgccttggagtaataaattctttcagtttgaccgtcagatgtagtgacatcgtagaaaatattaccataagtcctgttcgtacaggctatagtttggtaaagtgcttggcaaatgtcttccgttgcaccaccaaacacaaccacttggaacttgtaaggaggtatacctttagcatcagttttatcggtattgttagagaacactctcactttctcaacacctttcacctcgcttacagcgctaaggattgcaggacgggtagccttagatgttaactgttttgtgctggaagctcttaagcgatactctgagtctttctcaacatccctgccctcattgaatctttctcggttggtaagcttgataaatccactgggagtaggtgacattgttgtcacggtttctgcctctcttgacagctcaccagcctcgttggcgataacatctagggtgatagttctttcccctacaatcggggatactctaaaatctgccctactattaagtccaacttgatcaagattcgaattgtatcctatccacaacgttcctgtcaacatatcgatctgaatcaaatcgtcgtttaacagagttgtattatctacaatgaattgcttaatctctccgtaaaagcttggcagatcagaagagtccagagccttatctgttaaaaccagactttttgttttgatacttccatctgtctggttggtaatttgaaagttgtatttaccaatccttaggtctggagcatttattctgtgagcaataagattccctgccacttgcacatcattgctaagaacaaagttgccactatccagcgtataagttttggaatcgtaaatcatattgtacggcacagttgtgttgatcgtcaactggcaggtacctgatgatttagaacggcctcttcggtaaataccctgtcttccaagaagttcatctaggtaaataccttctgccccatacagcgtctgtgatgcgtatacagatgctgccataagaataagttgatactctcgctcgttgaagatagtggtcagcttatctgcaacggagttactctgtacgttgaagttttcgccaaaagcacggatcaggctttgcttagtttcaacgattaggtcatttagggttggtataacgaaaccagcctctgtcaatccatacttagccacgtcactcctccggtatgaaaatctctacaaggtattttaccaaattttgtaacaatagtcaatctgagcataaaaataaaccccgccgaagcggggctttaaaggttagtcgtgagactcgttccaaggtccctggaagctagagtttgaacgacttactatcacagtaggacaggagattgtgacacctgtcacgcttgacgttgaccacggtgtgtaaatctcgataacaatgtctatagtttgttcacccagacctgttatccctaccgcacacatgccgttgttgtcgttaaaatacttcttgccagcaaggatctgatgaccagctatccatgcattcagttgggagctggcaagagtaccattcagtttaaagaagaatgttacgttcttaccctgacctgaaacgttatctacgtatctccacctccaacggcaaaccctttgctgggagttatatactggagcacaatccccgtaagtcctgtgtgcaacaattgcaccttcgaactggttagcacggataacagaagcttctacacgaccacggaaggtacctccggttgcatctatggtgcccctaaagctaccattattggcataaacatccccacggaaggtaccactagtggcgttaactgcccctgtgaagttaccagaactagcgttgatgttgcctttcacccacacatccataaattgggcgtgcccgttcttgttaatataccaaccgtatttatggtacccgttgccatcgtagttgtttgacgagatttcttgtgcgatcttggcagaggagatcgtgccattctctataaaagcgtctttcaagaacgcttggttgttcttgattgcgaaagcaagggttgctgttccatttcctgggttgtataccgcaaaattgtttgcactaaccatgaagtaggattgaacttggcccccagacccttccatccccaactggatacctgcaacatatttattccctgcggagtctacctgtatttttgtaccccactgagcatttactttaccctctaagtcggtcacagccttagctgttgtagctactgcagctctgatctcggacacatcaccaacaccatcaatgatctcctgcttagcaacagcaagttcttgacgaatagctgacgctgtgccgttaatcagatcaacagtggcgttattagtttcagaaatattcgcagacaagtctttcttagtctgagtcagcttattgtccaacccagtaatattattggtgttggttgtaatctgccctttagcagtggttaactgctcagtcaaagctgccgttttctgattcaacaggtcagttgtggtcttgttggtggtagaaatcaacgtattaagatcagacttggcggtgtttatcttaccatcaagcgtggtgtagtttttggacactgtggcgttggtctggctaatcttctggtcaagagtctcagaagttctgttcaacaagtccacagtggcctggttagtgctcagaatgctcgcatccaactcagatctttgagtattcaacttgccctctaggctcttatcaccagccagatagcctttttcaacatctccgatctgctcagtcaactcgccctgtgcagcaaccagtttttcatccaacgcctctgttttcttattaagaagatcagtggtggatttgttggttgactcaatcaaggatgatagtttagcactctcattctgcaggttgttggtcaactcacctttcgttgctgtcagcttattgtctaaagcctcggttttacgattaaggagatctgtagtcgttttattggttgaaacaatcagagagttcagctcagagctttcctgtgctaaagcatcttccaattcaccccttgttgaaacaatcttctcgtccaaagcttcagttttctgatttaacagatcggttgtagctttgttagtggtctgtattagagaagtcagcttgccactttctttagaaagatcatctgcaaacttgttctgagtggctaccagtttctggtctagagtggtaagcgtcccattaacgtcctggaagttgtcgtgggtttcttggatgaatattccaaccctatcccccaactgagcatacagcttatctactctagagaactcaccttccatgtggtcaaaagcctcgtcaactctaccatccatgtacctgttaagttctgtgacacgattttcaacctcttcaatagaggaatccaaagtgctcatcaactctttataagtttctgtctttttgaattcagcatctatctgaggcatcaaatcctcgatagaggtgtagcagcgtgcagcgcattctacaaactgagagctaccaaaagcgtttgtggttcgaatataccaataataaaccttatcgttctgcaggccttcagatgtccaagttgaaccaacacccatacgggtggcgtttgaagtaacggttgcatcactggtgtcgggcaaccttgtcataccagatgtccaaaagtcatactgggtgctaacacttgctaaatccctactatgcggaatcaaggtgatagcaaagtatccctgcttaacctctacagaaaccggagcttcaggtgcctgaatgttaaactcacagtacgcttctggagatacaccacctttataagatgttgcaaccacggttgctgtgtatgaccctttggtcaaaccttctactctgacaaactgctcaactgtctgtgctgtccaaacaatctctccgttctttcttacctgcacaatattttgagcgtaagtcccaacgttgtcccaagccaaaacaccgtgagttacttccccagcttggagaacggagtatctgaagttttgcggctgagctacaccggacggggatatcggaatatctacatcaccggaatccggaagttgccctgtggcatcattccactctttagcatcttgacgaagttttaccttgacaccgccctttttggtgaactcccattcaagaaccctcatttcttggcccactataccaatacttgggaggtccattgtaacataacggccaggcttaaatttaaaacctcgcatattgcaggtgacttcaataatcctgccagctctagcacgtcttaggaagattgcagaaacacgttgagcttgataaggactggtaacaaagcgatagtctatatcgattatctttctttctccatccttctctatccactctgggacaaacactgatggaaaatctgtttcagaataccctttggtcggactagtgaatctgccagttattgtgttggatcttttgtcaaatgaggcttccggatagatctttacctcaccacagacacaatcctcactcagtgtcattgttgccgggccataatatgcaccgaccagcaaaccatacttaccagctacatagctgagatctgctccacaagctttcagcatttctgccataatacttgcgggagcctcatccatgtcaaactcaccgttaatggtgtaacgtcgctcactggttccgtcagcgttttttaccgcctcgtcgcatatgttagcagcttccttgaaggactcccagttgatggtttcgtcaggacatttaaggtacgttcttaaatagtctaggatcaccaaggccgcgttattggtatacacctctttactgatacgaggatcatagcattttttaccaaccttgacgagtgtaacgtttggcaacccaaaaggaaacttgttagggtcaaacttgaagctggcacgtagccaactgatccctctacctatcatgtctggtgaccacgatggacagtgtgtccccatgaaaggatcagctgtttttctgtcgttatgtagctcccacgataccagatctccatacgaggaaataggattaccgtcgatgagtatgtcttctataccttccagaggatgattggcaagaacaatagcacagtggagagttctgtctctatcctgctccaaaaacgcaagcaatccggatgtgcgtgtcttcccatacactacagagcaaggtgcagcagaagatctgagaagcttttgtctatcttgctgacttctgtaagatttgttgccctcaaaaatcttatccagagttctggtggtaacagtgttcaggctgtcagccagagctgccttggatgcgttccagtcataacttgaagatcttgcagaagcaacgatgttatcaatcattgcaattggcattaatacctccagacatcaacaacgacagaatctttcatatcgaacataaatacccctttatcacctttcgcccaaatctggttgttccagaacacaccagcggtgagcccgttcagaccttcgaagataacaatatctccacgctgaacctgtttaggagtatccagcctagtcataaagagatcaaaaatagtaggcaggtgtgtggttttgaaacggagcatgcaccatcttttgctttccaactccgttttatacgttccttcgaagttagaaagaaaatctgttccgtattgggcatcaacacacttagctgcaaaggtgcaacaatcgtggaatccccattcaaaaggtatggtggcctcttcgtcaaatactttccacaatctttcttgccagtccactagacgaggatgtgtgctcattaaacctcccaaatgatcgggcggctcgccacctgatccacatatttaaaaaatctgtcattatcgtttcttgagctgtggctttcctccgtgtaccgataaggaaaacctcttaaccaactgttgaagatggaagagatggatatggacaaagcactattctcaccagtctgaatagccatatctgttataaggccgtcaaacaagccattagttgtaacaggcagaccattctccatagcggtaatgtacaacgtggcacgacaaccagaatactccgtcttcagcagatcacccacatacttaggatcaaacccgttcaatgtcgctaccacagatccgaagttggtggcatctttctcagacacagcagttaatgttgctgatccacctatccctataaaatgttgcccctcaattactacaacaccagtgcctgagcacaccctgacagttcctgtcggtagctccagctttgcagcaattaagatctcaacaccatcaagctccagcttttcaagaaataaattatctaatggcgctctgatcatcttagaaatcctcaaagaagttgataactatattatcacctttttgcatagcatcgactttttgcttaattttgtaaatatctctgatatgaaacctacccttcggagattgagttattatcttcatggtgtcccctgcggcaataggttttctaagtcttggagatatgcctataacagcagacccaacaccatcactacgcactggagctgttaccactttcaattcatcattgacagatattttatccccagctctggctatgtctctgtttggctcccacccaacagtcctcaaaaaatcatcgttaccagtaggaccaagggcgattggctcattagctgtaactgagtgaccgtaagttttaataagaaagatgtttccatctttatacacctggtcaacaaagctcttaagctctagcaactgtgattcgctgatattggaaaccgtcaaagtgcctttccagttaggtgtggcataggttactttttgcgttttacctgtaaacggacttttaaacgtaacaatatctgccagcagctccaatctaatatctggaaggtatctaggcctttcccataaaaacattgtgcctccaggttaaacaatcatgatagttattttaccagattttgagttaatacgcaatacaaacaaaaagcccccgccgaagcgagggcaaaacagttacttcagtttctcttgcaacccagtaacaacctctgtcaattttttaacctgctcctcaagggcggttattttatcgtcctgttccctgcaaacctggacaagcaagcctgttacggctgcgtaatccacgctgtagaatctttcctctgttatcaaaggagttccatcttgatcagggtttgggatttcctttctttgcacgaaagagctaactgcttccggcagcgcttcaagcacttcttgtgctataacacctgcataaggcataccgttctctttaagagtgtaagtataacccttcatcttccggatagcttctaacgcatcaggaataacagatatgttgtctttcaggtctctgtcagagctctgattgacagatgtgcaattcacagcaccgtttacagaaagatatcttgatttatccggcaaggtaccgcaatgccatacccaatttgcttgagactcgtcaagaaccttaaactctaacacgtttggacgatcccctgtgctgccgttaccccaatagtgcatatgggcggcattagcaggcatgttgccaccgttattagtaacatggcttccagaaatatatacctttaactctgaggtcggtatttccccttcgggagttgttcctccatatctgaagctaacaccattgccacctgtttgggtccacgggccccaagtgaaggtttgtctcaccatattaccataacgtataaatctatcgccgtgataggtaatatactcttgaacacacccattaccgttattggcgttattctgcaacacaataagtgttccagcttcatttaccggataatgacgatcatatgttgcatcattatttgccgattgatggtaaatgccttcccacaacccattataggtgtcaaggtctgaggtaccgagaccctgacccctgtgctgcatagccttattccaggggtggtgattaccgccttctatagacctggtgtataagttactttgtctgccagcaatctggaaagcgtagtttcccgagaatcctacagataaacctcctacaaccatggtgtcttgtggaccgttaacattaccagccattatttttgacgggttattaggcccgaactggttgttccagtctccaccagtatgacatacaaaaccacctggggctgaaaaagtaccatccttattgaagttgtagaatctatgagctgtgcccacaacatctcgaacaataacttgaccagcctctggagtagacctgaactctgcttgacctttaaggccagcaccattaccgcatttagaggtaaacgtgccgttagttagatcctctgttccatctgatgcacactggaatcctgcgttagagaatagcgcctttctaggaccactgtagcacaaatagtcaaaaccgtcagcccatagctctactttaggcatgttcattttgctcattatcgcatagcgttcagcagtgcctatatagtgccactgtgtgccgccgccagtgtagaacccagaggtacctttgaagtcaacaataggtctggtgttggtattgttatctccgagaacagccagatttaaatctgctgactggagaggtgcaacgaacttaacaccgtcctgattgtctgttacagagccaacctggtaatcttgctccctggtaaacacctcgacaacatttctacttgcgtatatgctgacagggaaagcacgcgcctctgcatagaaagcaacatattcttgtttaccccttgttggagcaaccatcccaagaagtgctttttcattctggtagaaatttactaccccgtagaaagagtctcctctgtctgtccaaccaccagttctatagtgacactgtaaggtagcacagttcatagggtcatttccagatgacgatctggtaactatggtaatatcagtaccagttgctggagcatagtacggatctgttctaacgatgatcgggtagtatttcccatcttccatccctgcggttcttggcagtgttaagaagtctttcacacctgctgctataggaactttgaacagattctgagcatctgctagagttgtagccccggtgccacctgcggcttgaggtagaggttcccacttggccttccggttgttataaacaccccattccagagtgccgttaccggattcgtccatccagccatcccagataaccatcttggcggctttcttagatccccagaagcctctttctgctcctgaactacgtatccactctccaagtccccagtttgtcagctgaccagtaagatccccaacctgcatgtatttagggcagtctaatacaccgtcttcgcggaaacccaaatatctatgagtttcagatccttttgcacctttgtggaggtggattgtcaaccaagccttattgtcgtttcttacctcagagtagatcctatatccatgctcaaggacaccgtcagcgctgtatttgtccccgttaacaataccggatgctgacttaacatcagcagaactttgagacaggtaaaggtgcccgaaggtaggagaatttctagacccgagaccgatgtgcgatctaaaggtatcatcgttacgaggtctaaccatcggctgccatgcagtccactgatttgtgttggcctgataggttctcaaataccaaacatctacgttagagaatgggtagtattcctgacgacaacctgtaccgccgttagcattgttctgccaaacaatcaagtgaccagcaccagaacctgcagggtaaccatttgcctcagttgcataagcagtcatcggctggtagtatacaccatcctgattaccagtcaagttattgatattgaaatttggctcaagggctgcacgttgcttatagaaagcaccgatattgatacggactccagcggcatctctagcccctgtgccgccttgctctatagcaagaggttgccacgaagctgtttgttggttccacataccccaacggcctgttgcatcaagctgcaagtaccctgccgtatttaaatcatctccagcacggataactgttcttgttgggttgtttgcctctaggcgtttaaattcatcacgaagtgctattcttttcgttgttgctacaccgttggttactgcaatggtgtacatggctccggtggtagcgccacggaaaataccatcaacagttgtagtatcacggcgagataccacaccgttcagaaatttttcaccagctgctacagaagggtagttggtggttcttccctcttcaataactgcagggccaacaaagttatcaaggtgaataacatcgcctacggtgtgcactgtaccaaaatctacacgctgtgcaagtgctttagcatcgttagctgtctgaacagtaacatccattacatcctggacagactgcccttcggctgtcatgatcatagatgcgccaatggtagattccagctcctcccttaaggacgggtcagtatataccatccatgcagcgtcagtaatcccaccatcagcgtacggtgaagacagtgcaggaacagtgtgcggaaattcacctttccaacgcaggtagaggtcttcctcttcgaagtaggcaaaatccattgggccgtttaacttaccaccttccttaaaggagattacatgagaaacagtcccatccacatggacaacatcgccaatttttacacgacgggtcaggtctggttgctgaacaaccaggtaatcatcctctgtcactgcggtagtggcaggaagagattcaattctgacaactttaatatcagccattctttctcctgaaagggggcaaacagccccctatgttaaaggtacaatccacggtattgagcataaaggcccagaccgcgaaggatttcgccagagtgatagccaaccggatcagaaactgcccagcagccgtttaaaatattatccccattaatgaagtggtgcttttgcagtagcttcacacaggcttctacaacaatatctatttgaggtattgtctctgaatatccgcacagacctagccagcagcaacctgcaagccattcacctaccacccacatcctgtctcctctgtcctgataagaatatcccccagaggtgttaaagtctgtaggcagatttcctgaatgagatgactggaatctgttgaggaaccatgcccatttctggcagaacaggaatagtctttcatcaacaggttctttatgtttcttgagctcatatattgtgcggcacgcagcaacaaaagatcttgactggagcttagagttatctaccatctcccaccaaccagtcaacccttcattacctctttgccatacataacgtgaggcaactggaccctctgtcttaaatgtattattataccagacttgagcgtcatacagaaagcctattgtatttgacaatctatggcgatctatgttttctgcacccatgcagtagactgctgggtattgcatgccagggtagggccaatttggcttttcctctaagagatagttttccttatctatcacctttccggcagggaacacacccggtgtgtgcctgtatgcaccttgcttgtagtttctgacatagcaatctccaaccttagcggttgattctgtcttgcttgccatccatacactaaaccagattagataagcatccctatctgcaatatagaattgcggcagcgtgttgacgcaatatagatcaaacaagccattacctatctgcctgtcgcttaggctgaaatccacagaggtgagccccttaggattagcaaagaaaggtttaatctcttcttcggtgtgatgaggttgtgtcggatctagtttgaaatctcctagagtaagagtttctgttatccattgtccattagtggcatatagatcagcataccataaccacctgtctttgtcaagaaatttgacccttaccatctcatcatctgatcgataagttactgagtttaaagaaatctctcttccaaaattgaaagttactttacctcttgctatattacaacgggtgaagttgtcagagtggttgtaaatgtcggtatcatactgcatactgacactagcgccaccgctcacggcaatgttttcctctttaggtaagagatacggattaccgtctttaccaaccacctctacgaaatcggtaaccttggcaactatttctgttacctctgcccctccaaaaggaacccctatcctgtactgttttttgttattgttgccatcattaaggatgaaatgtggctggaacagaaccccttctcctccgaaattcataacaatttcagcatctctgcctattttgtatgtagtccctttttggattatttcgcaaggctggcgtgcgttcattctaaaattgatatacccgtcactgtccctgctcatgacaggaactgttcctgcaacaagacaagtaccatctgtaaacggtgccttaatcaacgtggtctttctaaacagtttgtcgtaggcgtttatatcactgaaattaagcaacttgttgtaagactgttcaaacgcggtgtaatacttttcctcacctgttaaggtgtagagttgataacaagcgtcacaccacatctcttccccgtccaactctggggcttgattatctgcaaccacgtttataggatttacaattacaggcgatcctgcaggtatcaccgatccaccctgctcttggggtaatcttacacaataggtcaccttgtggctgcctgtaacacccttatcttgtaattggattgtgccgaactctacagacgtatgaccactgtcggctatgctaccgttagcccaatagcggttaccatcccatgctatataccactcaacccaccaacttaatccagatgttgtccaatctgggttagcatctgtgccgccgtaaacatcagcgtctacagtgtttcttcctaacacaccgttatatgcttggaaggccttgtccaggtattctccccatgtcggagatccagctgggatttttcctctaccgttagtaaaagacaccaccacatctttaaacccaccatgtgatgggaccccgtctgtggatagagggtagtgggacaatctttgcattttactttctacagcatatgcgcccagaagatgactattgtaagcttcccaagcatcttttgccctatccagatagaaatcgcttttcgatgccctgtatgcttcaatgtatcccagaatcaacacagcttgggactcatgcattgcccaatcattatttatcttattacctgcccaccctgcagctataagaccatcagggtttactagcttattttgtgtaggggtgttggtaatacctgtgttgttatcgaggcacttcctgtgcccctcaatcatctgaaatacgttatcaatgttgtgttgaatacgcatcttagatagctcctgcgataatcagtgccccgtaccaagttaacccgttgtcgtaggtttccaacttgaaaatgtctgttgcaccagccgtgaatgttaggataggatctcttccataagcccatttaacattatcaggccaatagactttgttgccgccagaggtctgcgtaatgcatacggttatagttctcgccaccccttcaagaccttctgtttgattttcaaaagagattgtggtatttgaagttagtcgaactttaaaggtatccgcaacttcaagatccatatcaagctgaccaccgatagatccgtaatcaactattctgccagaagaagttgcagcaagctcaccaaaaacagaccaggcatttgcagacacacccccagcaccctctacagtggagtctgggaggattattttaggataatccccgttccacgtgtagtagcgcttagtttcggggtcgtaagcaaagtccttcttgctcttaagataaccaccctctgtgaaatagactatcttagtaatgctaagatcgttgacaacatcgtcaatcttagcctttcttgtcccatcagtctggttgacaaccaagaagtcatcactcaggactgtttctgcatcttcaagatctggaattggtattgtaggataagctacagccatgatttctccttagttaacatcaatagcacgaccagactggttggcaatagcctcatcgttggaggtagcaataacaccagagtattcgcgctcatctggagcaagcgtccaggtattgcggttaatggtttgttctgcctcagtcatcagcagatctttatcctgagtcaacagagagcctacagggatcgggttttccatctcaggaccagcatactggttccaccatgtggcatctccggttctaggcaacctgaagttgatcagatagtacagtttattagcccacttaatccaaccctcatcatcacagagagaggttgtcccagaatcaggctgtgggtaggtgaactgatcaagacctacgaaagccagtcttacaatctcgttctctttggtaacaacctcaaagaacgcttggtatgttctcgatcttcgatccatggtagactggaagtttatgatgtttagcacatccggctcttgtcttgccacttccatgatcttgttatcaagaacagtcttcatgaccttcttactgagaaagtccatataagggaagccaaacaactcgtcaaagtaccagctccccttccacgtattaaacctcatccacaagcgctggcgcagacttacctggtttgaatctatcaactcaagacctttgtctatcgccaaatcgcctgtctgtgggtccatcaatatatcactataaagcgtagccatgaaagccctctattagtgcggtccacttgtctcgccatcagggcaagagtgggtatgacctttatattctgcatagaatgaatccaaatccacaccagcagcagttataattctaccagatgggtctattgtggcaccattcattctgatatttccatccacagcagctcgcaaattggcagccccgttagtgaaagaaaactccccactgctgtcgcaccgtaatgtcccaccaggtgtttgaagctcaaaatcgccagaaggtgtcagtttaaaataaaccctatcattccataactctacgttatcaggatcgatctgtaaagcgtttgagtctgaatgaacagaggtgattgcccaccctggaaacaggccgtgagtttgttgatcgtcgttattgttttcatttctctctgaaaactgcaatcctacaacatctccggccttaataggaagtgttaaccttgcctttccgctgtttgcggacatcacttggattggaacgtcatagataagagggtatctctccacatctccgtcatcaaacgtggtttcagctattggctgcacggctgcagaaggtatactgtagtcaacactgacaactctggccctgatacttgtgtggtagtccctcatcattttttctatgaaggatcttacagcagcatctttcctatttattgccattatacctcctcagttttgtcaacaactccacccactgtttccccaaggccaagctctgtagtgtaatcacctccttctatggtgcccttatgatgcaccgtgatcaccttatagaatcctgtatattgcttgcttttaagataaatagtggactctgggaggatagctccgttaaggcaggtggttacagtaaggccaacatcctctctcgggtttttctttttctttttagatgtcgaaccacctttggcagcagctttagcttttcgttttttagcaggttctgggtttttaggggtaggcgatccgtgcatcccagactctgcacttatttcaaacacagagtctttgaacctttttccaaccttggtccaatacaaagctccatcctgaacgctaaatgtggagttggtcagccttgcaaacctgcggaggttctctgcagtgtttccagagaaagccatagagtattgcaaagtctggtttccaaaaccaacaaccctaccttttggcaagttcatatccttcagtaggtcattaagcacagagttcagaggtgtgcctttctgataagatcttgtgctttggcacttaatgatgttctcagtaccatccccgaagatgaacttagtttttctggtcggaccttcccatctgtcttcaacaaactctacagttccggagaatatcaactggttctcatcatcatagccagcttcaaacataactgcaagggcatcagcctgatgcatatccagatagttaactgtatcgtcagacaggttgtaaactgtcacataacctttgtttggctctttggtattgtccttttgtatgtcaaactctatattggcggcaccagtgtctgagctaacttcataaactccggaatcactctcccctttcttttcaacagattttgggatattggtttttgatttaccgccatgctctaccggacgaccaaacaataatcgccatgttctacgtctgtactctgccattattctaacccttgctgttccttgtaaagatcaaccggggtgccgtatacaagttgtagctcagatctcgccccaaggttatatcttccaaccctaccccaatattgatcgtctttaaacgacagcgccatcagtctacctttcggtaaatcatctctgtaatgcagtccgtctaaaatatcttgacaagctgttacttttctggttactaaagggctgtcacctactggaccaagagataaccaccaggactcatccctctcattccattgcatacgcatttcatacgtttcattgtctaaaacaacacgcatggtttgatcaggaaagccgtcaatgtcccacacaaaggtaattatgcaccaatctttaagctccattatacgctctccttatttcccgttaactttgttgtagtttccctgctcagaggggactatggtagaaggtcttccatattcctgataataccaatccgcagccgattgggtaacaccgttttcatctgtccacatcatagatttgtatggctgccactcctctgcagcgtttgtggatgcagtgtctgcgaatgctcctgtgtccctcttgttacccacgttactgccattcttacagtcgttgacagcacctttttgctgggttttgcctactttcttaggattgctgtatacagttgcattaacaaccttattcaagtagaatgtgcggaactctgtaagctctacatcaaacaccattgcagcgccttcaccaacagacttgttggcagaaagactggttatgatgtagttctcaagaagtctctcctcggtaaccaaagaaaccaactgtcgcttattgataatctcagtcaaagcctccaatgcagcgcctggtcgcatagatgctgcagggtttttagagtcagtattcctatcaatgtagttttgctcataaattatgtgtggggatgtatttaccctaccagtaaaagaaaatacaccatctttaattacagcgtggtctgacagggtagatttatcttccaccgcaaacccagtcttatcaacagaatgtttgaaagagtaattctcaacctgatcgaagataatggcaagatcgttagtaaagtttttacccttcatctccgtattgcgaccgccatagttaagaccgctgacaaacatagtgtactttacatcgctttcagtttgctgctctgccttttcagcctttggagatttaacctcttgaggcttgtacaggtctttttcatcaactatattgcttggcataacctctccaggacactccgataccatctagatattgtatcataaaatagccgtttttacaacaccgataaaataaagggggccggagcccccctgcacagtttattaccaaaggtcggtagacatgaagttgatatctttattgttctcccactcaagttttgcatcaaatattttgttaaactcaccctcatctattgaaatcgtgattttcccatcactgatctctaaaggtagcatttccatagttcttaattgagaagcaaaaccagggccacccggcaacggaagagtcccgcccggtaaggtgtccaaaggattaacaaacccgttacctcccgatatgatatctttgcgaatcatatcgctgatagtatccagctgctgatttctttcacttagtgggttgtaacggtcattaaataattccccggcgcttagtattgtaccgataatgcccagcttaccgagcagaccaactttgccaccaggtgtcttgaggccacctccaccttttcctgccggagctccaccaccagatccttctgtagtagcggcacccgctgctccagctgcaccccttagagagttaaggaatttaaaggtttttacaagcatagatgccatgacaaaaccttttgttagggcgttgacgaccagcatgatggcagcagcaaaccctgcccatttagcatagctaaaggtgtcatgaagctcttcagaatattccttcgtcttggctgttatgaacccccatttaatcccccattcaaggaaaaacatgcggatcttgactatagtgttgtttagttcaccaactacccagttaaggcctctcacaaacccgctaacaaaatcaccagaggcatcccacacaaattgcagagtctcaccagtgcggattagtgtataatagaactctgttagttcgtcagaccaacgggtgaacagtttctgacgagtcagttcgataaaggttttcagtctgttttctgccagcacgttagacttctgcattctttcataaccagctgcagatgcctcgttcatgtacttagccacatacttcatgatcttggctgttttaacctcgcctttcttcatcatatccatgaactgatccatggagagttcagaaagaccaaaagcctctttggtggccttgataaaaggttcgtatgcaccaggcaatgcttcagcaagctgttgcttcagttcctcggacattacttgtcccttgccaagcatctgttggattgccataataccgcgctggtattttacctcatcggcaccataagcagcagcatactgggagtatgcagaaaacagctcatgcacttcctgatttgtcatctggtttttggcgtttaccgacatctgggcgtaaccttgaagaccagatttgagatcaaaaccaagacgcatagcctcttgctggacaaacgcaacctcactgttggctttgtttggatctccagtaacagcagtaagagcagcacttgccccctccatcatgtgaccggatctgttaaccgcagcaaatccagaaaaagctgtatacgcagctgttgcattaataacagatctacgtaagtctctcatggcatcgcctagtgtaagcgtttgactggtggcgcttttaaacccagactgcagcgctgacaggtgggcgttaaaggttgacttcttcatctccccgcgagcaaacctggactctaactctgagtatcctggcaagcttccacggaatccggccccatacttggcagaaagtcttatcgcggagttgtagaggtgggttctccttgcctcacgatccgacataagcctattatccataccagctttactgtctcttcttagctgtctatgataacgattcatagcggctgtctgagctttcacaaggttagggtcggaagccacaccacccatattagggttaccggggatatatttgaaagatttggcattagccaaaactcttgccttaggtgccttataaccaccgtaagacactggtgcagatttggcagcctttttggcctctttagcttgctgctggtagaacttacgcatcctagccatttctggatttttagcggtaagattacctacagcttgtttacgtctcgcattctccctacgttctattgcagcccttactgcagcctctttcttggcctgtgctacgctctctctgtgcagtttagcatttgcctgagattgctgtctggcaaccctctgcattgtctgctgggttttaacagctaccgcctgccatctactcatggggttggctgagttaaaatcctcgcccagtttcctgaactccctcccaatactgcgaattttctctacagcttttttgtaggaggagttctctatctcaaagccaatcttgttgactgttgtggcaactattttgtttgtagccatggtttcctcataataaaaagggccagatcccagaaaaggaatccggcccttagattatcctctcctgcgcttagctttcgcagcagctgcggcagccttctgctcccgctccatttccctgttttggacggtatctaggaattcttcgatatcaagatactcacagagcttcaggaaatacgccatatctgcaagatttagcgattcaaaattttcccctttgaaattcttgagcaccctgcaccaaagaaagtcgaaccagttgagtgaactgttcttggctgcccactcactggccctcacaacaaccttgcttattcctgctcttccggagtctgatccaggttgttcacctgctgaatcatacccatctgctgtaacatctccagaaggcttcctaaaccgtcttgtgtgaaaaaacagccgtagttaacctccagaaccttacctgccagcttaatcatctccagcagatgccctgcaaacacaacatccgggttaagcttatccacaccatctacggtaatatcttcgaacaagattttaaatagctcttcaatagagttatcatcaagttcttggaacaggtaagccagagctgtaggaaggacctctgccatgttctgaccgcctgagataatagatccaccgatagcacctagcgggacagccacaatcttaccgattttaggcatgtttttcattgctttcatcggtccccagtgggtgatcacaaagttgtgccctgctaaatcaatctctgttgtaggtctaaagtttatagccattttatagcatccttattagtcatgttgtgcaccatatttgtgtattttaccatgattatggtgcattgtcaatttaacctttcaagcaattcaagaacgtgtgtcaaaaccataaaagcaaaaagccccacccgaaggtgaggcttatgctaaagtgtgcccttagataatacctgcaagacctgcgaggccagtaagagcaccagtgatgttatcacggttgagccatgcatccagaataccgatatcccagtccagctgacctacttcggttccgtaagtcaggtcaggctgtttctggatccaaccaattgtggaaataccagggccctggctaccttccagcagaaccgggaagaataccaggccagtaatcgatgcctgtttctgccagtcagaaaggtaagcgttccatacagaagtgttctgcaaagatacagtcataacaccagattggttacgagacagggcagcagacatttcgccatccacaccaacgtgagggtagatgttgtcttcgtttcttgaaacaacgatcttggtgtcagcagcgaagccagtgacacgctgctgcatcagatacagtttgacctttttaggatcataagcataaggagttaaaatttgagtttccatctagtcttccttattcagtcattgcaacagcattggtggatttagaaccaactttgtccagaaggacgttgatccggatacgaacgaagtgcagggcgttgttatacaccagttctactttcacaccttccagaacacgagcagccaactgattggttggaatctctgcacgtttaggaactgtgatgatcgggtcgtagaacacattgttgtcttcgtcaaaacctgtcaggatcgcaccattcttaatgccagtgttgattgggttgttcatcaggacagacttgatgaccggaagatcatcatcagacatcttcatgcttaaacccatgttggagcgacgatgcatgtacccaaacatagattcttcagatctgaacttgatccagtgtgcaaaacgaatagcgtctgcatactgacctgaagcacacttaccttcccagaaagcgccaacaccgttaatcattctgtagaagttaacgtggttttcccaaatagccatacgctgagttaaagtcagagacggtgcaatcacacctggcatctgttttaagtgcaagctgtcgccgtaggacggatcgttggatgccatagcacctatgataccaccctccgggaagtccttatctgcacgaggatcgtacatgccaacactgtcatattgtgcagctttcagtttggtagcgatgttactatctttgccagtcacatcttctgcagtagagtagacgtgcagcttgtagttggcctgagcccacttagcacatgcttcaatgtcggtgtggtcttcatggcacaggaagtaccaattgtcccgctcagcattgatcttatcaactactgtagaaggtttttcagcattggcgatatttttaattgtatagttaccagtatgataacctacagtgcagtcaccagtgatggtgataacaccgtcttcagccgctacagtgatatcgtccaagttatcatctgcttcgattttagtcttcatggactctgcgatctgagttgcagctgtcccaccagagataggaactatcaaagaggtattgtagccaccttttgcaatagtcattactacatcggtatcagctgcggcagcaatacctttaaaatctacagtggttttttctttggcctgtctgccgatcataacatattgtggagggaatacaccaccaaaagcttttgctgcaaactcatacgctgcagagccttgtgcgaaaccatcttccaccatctgatccagctccgcatatacgcgagctcgctcagtaaagttgttgtggatagcgatgaacaggggagtttcgaaacctacagtgtcaataggttgggttccgaggttaactgtaacatctaccactttatctaaatatggcatttgtttcctcttaatatctgtgcacggatatcaaacacgcagtgtaatcattacactacacaattataacgattactgaccactgtctgtaaccgatttatcagaattgggtgaagggaagtgtgtggttatttcagccttaattccctgaagatcctcaaaagccccaatgtctgtctcaacaaaccttacgttaaatgtcagcattaccgtggctctattttcatacgtctgcttattcaacggcactctttgaggtgagattgttgaattgttagagtaggcaaagcacgatcccagagggaaatacttgtcataaaacattggaaggtttattgcttgcaatactctgctaagtgcagcatatgccctgccgcgataagctgttaacagataagtaacagtgtaactgtgggtgacgtaagcattaccttccgcatcttgaaactcattatcttcccaagtggtgggattgatcgccagggtttgcaaaagtacaaactcaccttccggcttcggtatggtagagctttctgccagaactacagttcttcctgtggcaaccttgacaagcttagcgatggttgtttcaagatcagaaaaaactttttcgaaagcttccatcagttttctccttcaggctcttctaccacaaaaaatctatatcttccaccaccagacgtgacataagcatcacattttaaaacggtaaaccacttcaggtcaccacggatgtcaggcagttgaatttgatcagccattgcatatgttccttcgtctggactatacaacttggttgaggagtaaactgtaaaagcctcgtactgtctgtcaccctcaggatttatctgggaggagtaatctttagctgcccttcctgtcaacggctgcacaacacactctaagacatcaaactcttcatactcaagttctaacccctcgttggcaaaagggccaccaactgttttgttatacactctgtggcgacctttgaatgttttacgaggtattagtctgttctttcctatcagcttataacctgctgccactcaaccccccttatttttactgtccgattttaaaggttgcagattcaagcagcacatcgtaatgccgcatagcctcgttgaagcctttctcttgtgcccactgctcgctaacagtaggattactaaactgcccagcctcaataacaaactggatagctttggcccctgtgtcccccatctgcttaagaatagcctctgcactcgatcccctagccatagctctcaacaatttttctgtcaaggtctgtagttgagtactatgaaatgcaaaagctgtctccatgaaattgcgaacaggcagcccgttccaaccgaagttgtgaatggctgccaatgttgccatatttaagcctgacgggtgaggttcgtcataaaagccgtaggttattgttttactttcaagtctcacaagctctttgtagaagcgatctaaacgctttaggttgaaccttgtttgacatttaacctttagcattatatccctcactaatgtattttaccacaaagatgcatcaaaagcaacaatttttaaaaactgcgtttgcgtcttgggtggcgaggaggttggttatttagaccactgataggtgtaatcccctggacatcgaacggtccgttgctgttttcattaaatttaacccgaattccttcgtctacacgaacaccaccaatgataatcattctgctgtaagcatctaactcagaatctacatagtctgggtgtgccagcagccaatcaagaaaatccttccattgggcgtaggaagatccaccacgaatctctatggtctcatcacctattttttccagacgggaagttatacttgcattaccactggacacttcctgcatcatcagccaccgcacaagttgcacaagaacattgtacttaagcagcggtagcttatcaggatctgccggataatttagtttcaacttctccatgtcaaggaatgttttaattacctcatcagggagagtttcctcatcaacattgccaagcaataacctcataatatcaataagaggttggtctggatcaggttccggaggcacaggatcttcttttggtggttcttctggggtatcgactacaccatcatggttaggcggtgacgggataatctcttcatcttcataccatgccatttgaaaatacctcgtaaaaataaagccccattcctgatttggaaggggccttaacaaaattatgccagtgcagcctcaaaatctttcatcatattttggaaagtttttgccttacttaaggtaacaccgtactctttagcgaaggtttggagtgcatcttttgaaccacttttgtcatcttcgttgttaagagctgcggcctgtttaaggatttcatccttattctcaacggttacaaatgaggaagaggatacagtcacatcttgcggatctgctacagtaacttcaccgtcaccaccaggttcagtaggacctacaggtggctccggctctggttcaggcggtggagctatcgtagagaccagtccaagatttacaacctgagaacgtttcttaggccactcaatggtgaaagtttgggtatcttcttcataaacaatgttgcattgctcatcgtttatggtcacttttttaggcatccctacagggtcccatagatggccctctgccacggaaacttggaaagccgcatctacctctttaaacactgacggggtgagtgtgatattgacatcaccgctttgcagtgttaaagtgctttcatcaaggttctctgtgaagaacagaagaataacacccatacgaatagttgagataccagtatcaattggcaggcctgtgtgttttgcaatcttctcgaagaagtctacaatcgttctgcacggatagtgaacactgccaataacgaattctgttggtggcagcagggctgataaaccaacattgatttctggattgtattgtgataaaaattgataaaaacttaactgattgttgaaaactcttaatagaggatcatactcgactggatatacagctctcttcacgggacactcctgttaaaccctaataaataaaaaggggaggggagaaccccctcccccccccatatgggatgaatcaccttagtgattattcacttttcagagttactttaacaaccagctctggacgggtgttaactgccagcatagaagtttcagattcaatcttctcttcacgcaggtatgcagagtgtttataccacatgtacagttcctgtgctggagtgtttgcttcgttaacatcgtctgccggagcaaagtgcagctggaacatctgatcaatacccatcggcagaatgcgagcttctttcttaggaatattgccagagatatcttcgataaaggtgatacctttatgctcaaacacacggtatacgctgtcttgaccgccagcacccagacggcgacgcagaggttcctgagcagagccgtaataggtgtatgccagttctaccagcgggtgatgagtaacagcactgaagaactccggtgagcacagggctacaatgcgatagccagctgcgttatcaccagcttgcagtgcgatgtgcagacgagcttcttccagaacctccataggatcctgatctgcttttgcagggtcgatctcaacagacttctgagacacaccccacagagtgtagtaatcatactggcaggtagcgtcaccaggtgcataggatttacccagaatagcctggaacagcgctttctcacgcagtgcttcatgggaaacacggatacggcgaacaacgcgggtcactacgtcctgaacagttttcggagcatcaggggtgaagtaacgacggaagttctggacatctgcagcagtgatgcctttatccagagggaagaacgggatgttcaggtttttaacctgagcacgttcattaccaacgtagttacgctcaccaccacgacggcgtgctggaatgtcggttacaacttcatcaacacgctcaatctgagcaattgttgaggtgccgagacgagtttcgaacagatccataccggtaatcaggcgaaattgacgcggaacaaggtccagagtagcacctaaatcgacaatgccaaattcatctttacgagtaatcatttatttctccaaagtaaaacttaaatatttttcccgaacaatttagggcttattattcaccaatagtctggacgtgaactttgttacctaaagcttccaacttatccagaattctttggtctgctttagctccatctgcacctaacagcatgtcttttgcaaaggtgacaccatggacggcaacaaccaggttataggattgtcctacttctaacggttttgcaagatgaaccgtaccagcatctttgacaagagcacggtcaacaagaacgccgtacacatcagaaccgtctgcgttagcgatggtacctgtttttgttacaacagtgccagcgtggtgatgctctgtcagtgttaccttaatctctttaaaattgtagccagcatcgctagaatcaactttgccgagcacgatatcagaatattgagcggtaatcatttatttcccccgttaatgtcttatttgttagattctgcacgtgcacgagcaagtgcttttgcaacgttttcagcaagaatttcttctgcggattttgcaatatcatccacaacaggttcgccatcattaccatgttcagtggtggcaaactcttctttagttttatgcacctctgcttccagctcttcaatttttgcttgagctttctccagcatagctacgataggttcgttagctttttccagcatgaagtcaaccagggttgcgtgatcttcttcaccaacaaagcttaaagcttgagccttagtcagcattttagctttttcaacttcaacctgggccttgatgatttcttcagctttactctgggttgctttcagctcttctacttgcttcagcagatccagatactctttagttttggttacgtccaccggattctcctcggtatttgcggattttgcaacatcatccacctcggtagttttatccacctcagcaggttcctgtaccgccttgatcaggttcccttctttatcgaagagatcagcggttacttgttcaaaaatctgttgtgtttttaacaggctgtactgatctaccacactaagctgcttgccttcttttgcagccttatgaatggtcacgttatcacaacgctcttccagccatgcaatacaagactctgcgtcagcttgcgcccattcccaatcaggatgctctttagcccaagcctcctcttcaatctcaaaaccaagcatgtgtgcaagtgctttagcatcatcataccacatatcgaagaaacgacgcaggtattcttcaaaactaagctccacagtaacttggcgaagtgccttaacaatatcgtctgttaactgctcaggcttaagatcactcttcatcaaaagagatacaggtctattgttagcgctatagccttgcgccttgtggcacagggcaatccccttctctttaatagtaatcgttttttcagacattattcattgccctcttctacaacactgatcccgaagtttacgttggtaatttcaccagtttcttcatcaacattacctgttgcctgaatgcttaggccaccaacaatgccagccttcttagcttcccatagttcaggattattgtatttaactttagcaacccaagagccagccttgatgacctgctcagtgccaatcactacaacatcaaactcttcttgaatccacgtcttttcaatggtgaaagcatctgtagaggtcaagtggaaaaggttctcagaaactaggcctgcggcgtatgctgcgtcccagttatctttggcctttttgatggtgtctttactcatccactccccgtgagcatctttagtgtcaggttcgtagatgatttcgtaggaaatcatttcttcctgtggcatcttattccccatgtggattattttatcacgccaaaggaggttttgcaaccccctgtgttgataatttttaattttccatgttggatatggaattatctctggttgatgacatcttagaagtgccgttgccagtggatcctgcagccattccatcaccagccctactgatgtcctggcccaagagcttcatcagctcttcctgatccatgtcctcgtcaaatctttcatcaaacccgcctacttcaagaatcttattaattactgcaggagtttttggcaagtaacctacagcaccgatcctctggacaaacttggagaagctctccatgtccacttcttcaatcagaccaggtttcagtttaggcatatcatcatcctcaaggatgataccattcaatgccagaagctgtggaataagatctttattgaaggcctcagtgataatatctatatcacgctgaacaaaatgaccatgaatagattgttttgactcagacagagagaaggatccaacgttatcgttaccaaggttaataaagccagcaccgaaacggtcaagaatcgccttcttacgggcatcaatcaaatctttagtggaatactgcttacccataccgtcaacccccttcagggtcatggagtaaagctctttaccagacttatctctatcagacggaagtataaagaaactttgctcaccactatgggcgtttgctgcgtcaagcataaggtctgcaaccattctcccttccattgaattcgggtcaatgctggccttgttcaaaatattggaaggaattttcagctcaagcacaccaccaaggtctttggaacagccaacaacctcaaggttttcaatcagaactttctcacggaaagatctgtagcaacctatcatcggtgacacacctgcagggttagattctgttcctgacagggtcatgagcataagctttttagcagggatgaaaatttcaggctcattaaagccttttgaaggcattgcagcaagaggtccagcccagcgtgcattctgagtgtttagaaatgcattaggtgactgataaatacctgtcagtgttctactattcttgtcaaagacaaacggctctgatctggacaaactggcctgaggtcggaatgcaattttatcaataagaagcatcccggcatatttaccttctttctctctgcggtatactttctcaaacagtgaaaaaccatactcgttaaaggtagctgcgcttcttgcaatatctcgaagagtttgttggtttgccaaattacgcaaagaatactctataagctcggcagctttcttagagtcttcacttttaacattgtaaaggatcttaaaatcattgaatgctttcgtgatgaaaacatattttgtatctaaggcagtagcaactgtggaatcacatttcatagtctccactgtggcaatcagctgaggccaacgcaattcctcaaccatcatagattgcgattctgccataatttgggaaagtgcgccagaaccgatctcactcatacgaacattatgagttggtgcgcctgcgttcccagatttattcacagttttggctgtggcgttgtgtttcctgcggttctttttggacacaagctttacccctcaaaacagtataacaaaatagccctcgtgttagagggccagtatctccgattactctattctaccacatctaattaagattggcaacacttagataaaacgcttgaacatagaaggtgatgagattgatggaatcacacaaggaagtgctacctcctctttctccaggaaattaatcgcagaagctacacagtcggcccagtcgtctttcctgttaaatgttgatctttccccgttgaatttttcaagttcagtcagaaatgcttccagagtatcaggatggaaactggattttacaatcctaaccattccttgttgggcaagattggcaaaaggtgagaaccttgtcagtttagatttgttggaaggcattgggtcttcttcaaccctaaacccttcggcgagcaaggatctggaggatgttaagaactcactcttacctgcctgaccagggtccacagagaatacgattatacaatcatcaccatcaaactgcgcctgtttcctgatgatcacatctcgttcaccagcctttttacagaacttaccttccagacctgtggaatacctcccgtcatcaacgttctcaggacaataatcaccggacaggtaataaaagccgtcgctatccttacttaccttaacactggctgtaaagtcaggaaatttattaccggaagttctctcggttcctgccttatcccatgccctgcaagatactgatccaaggggtactctatcggcatcacgaaggaaagatctttgaaaatagtttgcaccctcaggctttgcaaaccagttgccatgaagaagctgggctttttcaagctcgggcagaccttcaagaaaagcaaggtattctgggttgtctcttaagcagacaggattatcgaatccttatattcaaaggtggtcgcaacaccaccttccgcacctttacgtgctgctgcatgttaccatgcagagtagactatatcaccacccatttcagggtgcttcgcttttcgagcgccataagcttgcgccctactccctctcgggatagtcgttgaactacattaccaatcgtaattgtttgaaatataggtgtaagtcttacggtcttttattcctttaacaacactaaaacttactccccacttcttagctattttatttacacacaagaccttatcactaagatcctcgcagatacctattatcttgtgctcacttatccgattagaggttggcacttttctaaagttaaactctttagaaatatctgggtatactgagccattctttataccacttacaagtggttgattgacaccaaacatttcacaaatgtcttttacccttgcgccttgctctaacagcctacatatttcaagagcagtggcatcatccagagacctgtatttattgacatagtcctttttaagtcccatttcatgagcgtgatgtgtgttttcctcaggcgttgtccactcaaggttccatgcggcgttattcaacttattaccatctaggtggtttacttgagtttttacgctgggattgtcattatcaacaaaagtcatagcaatcactctgtgaacgagcacttggaactttttaccgtcctcgcacaaagttaccatagcatagccagtctttttctgcacattaggatggaggaatttattagaatacagactgtaaattctgccatcgtatgtagcacaataatgattgtagcctaaaaagcctaaatttttcatttcaaacatctccctactacaggttcggaagggtaattatagctgctgattgtccgtttagcaatcggatttcccagcaattaacgaagttattcgacgtgcatttctgcacgaagccactatcatttaatggttgcgcctatgaacgagaatgacaacggtcttggcttgatctctacacccagtccgttaaccgtggtgtatttctctatcaactcttctttagagtctccccatataaattcaccgtcgcgtcggataaaatatcttttcttaccgcatttctccggatctggatacccttcatcgtccaaccaccatctaaccagtttggcaagcatgtgttctgaatcggggttacagctgataaccattcttgatggatactttgactgagatcgcagacgagacatcagatagtctatctgctcccattcgaactgcgtgccctcatcgaagcaaaccatggtgtactcaagcccctgatggttaagcttatcttgtacatactccatgtggcagtattttacaacagctccctttttgcttctatcccacttgccagtgctcggatcaaaccgtggaaaaatgaacttatgatccttctctctgaactttggcttaatgttttcaggcagatcactataaatagctactgctttaggccatagtccaccctcaccttccaactgtggggttgttcttcggaacataaccacagagctgtgggggtcatcaataattttaagtggcatcaactgcaagaggaacgacttgccagaccctgcggcaccgccgattaccaaaatatctgcatcgttttctaggatcatcttctgcttttcagaacacggtccgtaaatcttagacattaacctctctcctttggaaacagtgttctaatatagtcttgcaaaatgatcaatttagctctatcattgctacaagacagattattatccctcataatgccagagttcactgcatctggcgcacctttcttcaaaggcatagctttagcaggtggtttcatggcaccttctgggggtttaacaatcaaccttcctacatctggagggtcaatcttgtattctttctcaacactggttgcacacccacataataacaagcacgcaataaacagtgtagcaactctcatcgatcctcctgattgatactctcattataaatatctataagctgatcaggaagtgttgacttcttaccttcaggtgattggaggtagataatctgcttttctctacctgccctctcagctatatttaatttatcctgcaaatcagaaagagatttttcaaggtttttaacctcctctgcgtggcccattttaattttgtcggcctgcttttgttgctgatcaaggatccgttcccactttaactctgttgctgacacaccctcttggtaggcatcattaagcttagagttaaaccaatacacggccccaagataagctgcacctatagccgctgcaaaaactaaaccttttatgatccctttatacctactcagccatgttaaaactgaaatcattttaaggctccagaaacgaaaaaaccccgcagctatgcagctaacggggcgggttaaaattgagtaacctaaatagatcgaaactaactaaaaggagactaatacttatcgaggcactcggtggatgattctaacagtaactgcattttcattcatcaagtatgcatctacatctctgtaaatataaaacttctgctcactatcaacaacacaagctaccgccccttcagagttgtcttcaaaaaagaccaccactgcatcgcagctgagttcatgatatgactctcgaagatttacagccagaggattgaaatcgtcacgaaaatctacggtatgggttggatttacacgctctacaattttaagtgtatacattttaaaggttccttttgtttgtatatgtttaaagtataactgaaagtggtctccacggagtgattcgaacactcgacctcctgatcccaaatcaggcgctctaccaagctgagctacgcggagtattcattatttggtggccctgggtggaattgaaccaccgtctggcgattatgagtcgcttgcttgaaccttccagctacagggccatggtgctgatggcaggacttgaacctgcaacctattgattacaaatcaattgcactaccaattgtgctacatcagcaaaaaggtgctaggtgatggaatcgaaccacctatgtattcaacgactacctcgtctattttcaggattaaaaatcctcgcccttgccaaagggcttacctagctcagtatgttgaccatgttgctagtcggcgatgacgactgtaacatttgataatccggttctgcttccggctttcgcttaattacaaggtcaacaatatggcagaggataatggaatcgaaccatcatcgagtcatcctcaacgggacggttttcaagaccgcttgagcaccattgctccctaccctcttttataaacaatactgataatgacactgattttcgagcagttagtgactagtataaacgacgataaatatcaatgccattatctgtatgatttatgcatttaaaaatataaatttggtggtgagtgatggagtcgaaccaccagaatcgcaatgataacagatttacagtctgccccgctacccctacggaattaactcacctaaatactaatatttaaattctttttaaaatagctagtgttctcaccactaactatgaggtatcggtaaagtggttaccgccacttgccgaagatttactctgctaaagtaagctacattaaaaagaacttggcaccccgtactggactcgaaccagtgtcaacggcttagaaggccgctgctttatccactaagctaacagggcactgggtggctttcttttacaccttagccgccagaaaaggtgggagaccatgtttacaatattacactgttaagcaaagtttgtcaagaaaatattttagctattgctaacaggctgtatttctgtagtaaatggcataaaaggtgctggtttttcagcctcttccactaccatctcttcctcttcaccaaacatctcatcatattcttcctgcattcggtctgccttatcaagaacatactctgcaatgctttgacgaatattttgtttggttttcgggtccaacatcatctctcttaaaactttgtgagcttctggaaccatcgctataaaagattccttcatatcaaggatgttcttctctagctgaatggcgttggactcctctttcagaggtctgcctctacggcgacgctttttagttgtatccgccatgtttcctccattatcacgtgataggtggattttatcatagcaaatactgattgtcaagttcgccgcagggtggtattccctgcgacttgtccagcgtcctggaccagcaagacccaacaagtgggttaccagaggcctattacccgcgcttcggctcgaccttgttacaggttggctggggtcacatcgtcatgtgctggctgcccctaccattttaagtgtggtgcactatcaagccctctaaggggaactcagtcttctccgaaccctgtttcaaagcatccggagataaagccatcaaattcatctttaaattggatattcatcatgatacacgaaaacaacctcattgtaaagcacaaataaataaaacatacttaatttgtttgttatcaggctcagggtagaagtagaagatcttgctatcaccgatctgaacaccaccatcccaacagcatagcccataacctgtattcatacaagctaagtcgttggcaaaatctattgcatcatccagtgcacgaaattcaccttcatcttctaaataatcctcattcatggaacgaaaaacgagcttaaccttaaacatagcattacctgtagacctcgtaagttaaaattgtagcacatcatattgcagatcttatcaggtaacattatttttgtcaacagattccggccttatctcgcctgtctgcgtattctttaatcgcaacctcatctgcattagtgaccaggtcttcaaagtaactctcaagctcctcgtcaatgtcaggagaccagctctttttcctgtcagtgtgaattgcagacttgttgaacttattacagttctttgctaccggattattcattaagcgctcctcagcgttcatagtaaattttatttaacattacctcatcctttgcagaaagaataccgagatatgcatcaccgaatctacctgcaacaacctctgcgtgatacatcacttcgttaatatcgtcaagagtgataactggatgaccgtatctctctgagtattgtctcagagtgcgatgtagggagtcatcatcataggcagactttttaatatcacaaacacgacgaatagccttgatgtcgaaaaaccctgtacgataccaaccaagaaaaaggtttcgtgcagtgtcaacatctacatcaataccatcaagaaccttatctacaagatagctgtcatcctttggacctgcttccttagtgcgaatgtagttgccatcttttccaggtgacagctccttctcatcaccaacctgaatgccatcatttggcggtgttaaccacttatccggatgcttacgatcacgagcgttagaatgattacgctggaaacctggcttccacttgaaagttttctccatctgttcttcattctgataacgttttgcaatcttttcacggtcatctttgcgtgagctcatagctgcctcctcttcaagttatagaaaaactcactgtatcgctttgtaacgagcttttctatcaaactggtgcgattgcattacttggtatggtttatacagctgtggagcgatttaggggcctcattatccgtttccacacataaactttatccaaactcgcgcgggagtctctcaaccgactccttacggcgctggcaagctttcgtcggtggcccacattagtgctcggcctttggcctgcgctatcgcttcgctcccacacatgttaacagacctgcatgtatgcacttctgttattgtgtgcactatggaggcccggcatctcgccccctcgtaggcgagtgccaatgaagggccgacactacctatagaaagtaataaatttaaaacatggtacttaggatctagtatattctacataagttaagtatatgtacttagtaccataagtactagatcttttattttttattatttagttattttagttatattctttatgtgtccgtatcacggacagttagtgtccgtattacgggcagatgtgtccgcgtgacggacagtagtgtccgtatcacggacagttactagcctctgttccagggcgaacataaaacatacgaatccttatagtacagatatttaagtttttactggtctaaccagttgttgacatccgaataacttcttctggtggcaaaactttggaaaatgtgcatcttttacctctcccttgtgtggatatttcaaccactcccgcacattctaaagttttaacgcacgctgctgcttttgttttctttatcccaacatctgctgcaattttccttgtgctgggtgtgaagcgtgaatttcctccaagcttataccagttgtgcaggtagcagtatacaatcttgtcatacaagtcaagaacaacaacctctccagttgtgtcattcaaaacttttgacatagacagtatttcaagggggactttaagatatagcagcttatccccatctttcatatctcctgattctccttgtgtggcaattttctttaaaatagcagggattactccccgctgtcaatagcaagactcattgcaatacggtatgcctcttctaatggtaagagtctcccccacacatcccaaccgacatcaagctgcctgccaaacaactgttgtgtggttccgtgagcatgaccgaacagttggactgatccatgaggctttctgttccactttgcaaactggtaatggctcatacagatcaaattcttgttgtggcgaagctcgtaataatctacaacctcgtgatagaactctttcataattctgacagtcgtccttgtgtcatggttgccacgaacaagaataatatgtccgttcaacatatttagaatatccgggagtaagttgttgatattcttatcattagtgcacgcaatatctcccaagtggaacacagtgtctgcaggtgacacaacagagttccactcggcgatgattcctgcattcatactgtcaagattgtgatcatactgagatctgtgtttttgacatgaatcaaactccatgacccgctggtggagaaagtgtgtgtcgcttgttacaaagtatttcatacattcctcatttaagtttaatgcagtttttaagctggcgttccatacgatccacaaccctgtctggaacatcatgaatgcttttattaccgtggcggttttcaaccacgatcacggtataactatacccatgactgattgccatgtcaatatattcttgcacatgtttttcttttgtaaacgtattacttaccacgatacggtcgtatcccatacgcatcatatcttctacgttatctttgcaccattttgctgcaagtgttactttacttgcatcccagttgtaatttccgtcatcgtcgtaccagaacatgtcgttctcaaaatgtggatacagaccttctaaagatagagcatttgccagtgttgatttgccagaccctggtataccacgcacgatatatagcattttagacatagcaatcccccgttttaattttaatgatagtatacctaactgttttgttaatttcaagtgttgacactaggttgtttgtgtggcaggatagactgacaaaatgacaaatgaggaacgtatgatgaagtattttaatgcagacgatctagttgacaaaggtcttgtaaccagtcgatattatccagatcttggattaaagatctataaatatgccagaaaagtattctacaacaatctgtggcatttgtcccctcgtttgctggagtgccgaggcattgttgtcggtaatgaaggaaatgttgtggcatggcccttcacaaaagtgtttaacttgggagaaaatcacaccaacctgcctgacaataagcttgtgacggcggtagagaaaaagaacggattcctcggcgtggtgtcatctcataaaggtgaactattgttctcaacaaccggatctcttgattccccatattgtaacctcgcaaaggaaaccatccgggagcaatgtggtaatttagatcttatcaagaaggttatgggcaatgaaaacatgacattcatgtttgaaatttgtcacccttcagatccgcatattgttcaggaagatcatggcgcatatttgataggttgcagatataatgattctggaataatgctgccagaagcagctttagatgggattgccaaataccttggcgcaaaacgtcctcacactgtgcgtgaaattccgttcagctatgcaaaagaattggctgcagaaacaagaggtgaagggtatatgattcgtaagccttactacccttatgatctgcagctgaagatcaagtctccatactatctggcacggaaggccgtaatgaggggtaaagcttggaagatttgggatgatgatatctttaaacgtgttgacgaagagttttacggcatggtaaacttcattcgtagcaattacacagaagatgtgtggaactgcctactggagcaggaacgcagggagatactcgaccactatttccacaacgaggactatatgcaatgaagaagttgattgtgtggctggatgatttgagagatccgtcaaattatggactcccagacgctgtttggctgaagaattcctccgagtttatggattttattaacgataagggaaagctctacagacgcgtttctgagtggcatatggacaacgacttaggagaagtattcgaaggatatgattgcctatccatgttggaggaaaaatttgtattcggtaagcctccagtggttgacaacgtgaagattttcgtacatacttctaatccatcagcggctcgtaaattcatgcttgcagctgactcgtttaaaaagtttggaatagagattaaacaaaacatctactgaggacacttatgcgacgactgattattatctccggtgctggtttgagcgctgaatctggtattcccactttccgatctggtagcactgcaatgtgggagaatttcagcatcgatgaggtgtgcaacatccacacctttgccaagaactactataaggtgcatgacttttacaatgcacgtcgtgtagctctgggcagtgttgatcctaaccttgcacatcttcggatcgctgagtggtattcccgctggtctggtcgtgtgatcaaccttaccaccaatgtagatgatttgctggagcgtgctggtgtaaaacatgaagatattttacatgtccacgggtatttgcctgaaatcacctacgaagatgctgaaggtaatgatgtaattaaaaatatcggatacacggaggtagatacaggtaagtatacctgggttaagcccaatgtagtgttcttcggtgaggttgctcctaagtatacagacatgtatgacctgttgacatctctcacaagcaatgatatggtgatcctggtaggttgttctaacacagttattaattttaactgggaattgtttcctgctacttgtaaaggcacaaaactgctgattgtaaacaagtatgattcgcagagtgcagatggaagtggcatttcacgtagcgacctttatcaatatgaggatcgcgggatccctgtatggtttaacggtgctgttgacgctttctctgataaagtatttattgaaactgtagaaaactttatggaactttaaaaggagacctttaatgctgaatactaaactgatcgacaacctggaaaaactgtctcagcctgaaaactacctttggtctgccaactgggtggaaaactggaaccgtgtggcagctaaggtgaaaaaatcatacacaccattcgaattacagcttagcttcattgaggaagagttcaatgaagttttggaagagctggagaaaggtgatggtggagatcacttgctaaaagaggcctgcgatcttcatgttgtcacaagttatgccgcttatcttgttaatgacaatcacgaaaagtggtcaaacctgtttgataatccacgaggtattaagttcaagattggtgagttctatgatacactgatcgctgcgaaaaacacctctaagcaaagagcgtctgcttaccgcttagcagagttgtcaacagctttgctgttccagcttcgcggtgatgtgtgcgggatgatgcgtaaggttctcaaatcgaatgacagcaagtttgcacgggtcaaccatctacggtattcacacggtgccagtgcagatatgcctgctgaacaactcatcgagttggagattaaagatcttgagcgacgctttgatggtcgatatgaaggttttgttgccaaggaagaattctacaacggtaataaagttatcatattccttgacagtaaaggtaagatcatgaagccttcaagcttcaaggatgtaacagagtatatttaacaacatagccgggtgatcccggctttacttgttgtggaaagtatgcaagtgaggcagatagttatgtacaagcactctagagatcttgaaaacgatgctgtgtttggggatcagatgaaagagttggttaaactcatagacaggatagaggataagtttgacactaagatctacatcgacagcaaagtattcaaccacaaaatatggacaaatctgtgtgttgggctacatggtgataaagatattgtaaatttggttgtaataaagttcatagtgtggcagaataagactatacgttattccgatccacacttacttgtttatcctataaaagacctactacagaaggaggactgcaatgccgttatttaatcttgctaaacctgtagaagcccaccagtttgacggaagctcttcatcagtatctgatctgcaacggtggattgatacaggtgtgtttacatcgtcacctgttcggaccagagatcttcgtcgcatgtgtgagcttgtcgagccttttggtaaccttgtcttgtaccagggagattggctagttgactttatgggagactggttggtaatgagtaaagaagagatgtttaaaatttttaaggaagaggccgagtaatgcatcaaatcaaaacaacactgtacgcactgaacaaagatggcagctaccaacagtggaaagtattcactgatggcgaaaaggttatcgtagagtttggcaagcttgacggtaaattgcagtacaaagagacggtatgcacacctaagaacgtaggtcgtgccaatgagactacagctgagcaacaggccgagcttgaggctatcagcaagtgggaaaaacaagtccgtctggggtatgttgaaaacatggaagattgcgagcagggtgttgatcttttacccatgctggtgcatgactacctgaagcgtggcaaggcacttaaattaccttgctggatcttgcgtaagttagatggccttcgtctgcttgttgttttccaaaatggtgagcctaaatttatttcccgtggtaataagtcctatcctattcaaggaaagcttttagagcaacttcgttctttccattctaccactgggattaaacaacttgatggggaactatacattcatggtcttcctttgcagaaaatagtgtctcttgctaaacggtggcgcacacaggaagagattcaggccgagatcgataaagactatgaggcagataaaaaacgccgtcatgccgcaattaaggcaggcttatcaacatacaaaaacttcaacaaggtagatattcctgtcgatgttgagcctgttcgtgatgatttgcgttacggtgggtactgtagctacgatcttgagtatcacatttttgatattcctagcgacaaggtgtggtgggatccagaaacagagtctggacgctgcaaggatcttatggatgcagaggataccgttaccactctgatgcttgaccatatcaaggttgttgacgcagagcttgcgtacacagttgatcattgcgaagaatctgttggtatattcatgtccgaaggatatgaaggtaccattatgcgtaacttctgtggtaaatatgagtatggtcagcgaacatctgaagcattgaaatggaaaaagttcaacgacgcagaggtgaaagttattgacgttgagaaagataagaatgatgaaggtgttcttatctgtgttgacaaggaaggtgttgttgttaaaatgaagatgaaaggcacgcacgaggagcgtagctatgacaggatgcagaaaatgatcggcaagtttgtcaccttcaaatatcaagcaaggacagaagacaacaactaccaattccctgtcggtatctgcgtccgaaatgttaacccagacacttgggaggttctggaatgatgtaggatggtttagtagataacggtagccaattgaatgatggtttttcaattggcacctacataaccacactatgcagtgttgttgttgatcgggttagttatgagtaaactggagagtatgaaaaatgaaacttgataaaaatgttcaacgaaaagctttcttggatcttattggctgggcagagggaacaacaacccaccctgccaccaaatgtggaggatacgatgttgtagcatacgggatggacggaaaacctgaaatctttacagatttttctacgcacccttttgcaaacggtcgccctggtaaagtgtttaactcaaaagggcaaagaactacagcctgcggtaaatatcaatttcttgtcaaatactgggaacactacaaaaaacagcttaagttgccggattttggaccagatagccaggataagtgggcaatccagttgatcagggaacgtaaagcacttgaagacatagataacggtcatattaaatctgctatacgtaagacctcaaatatttgggcttcgttcccatacaaccagtacgaccaaaatccaaaaaccattgacaagttgcttaagaaatttgtagagtttggaggtgttgttctggattaatgatcaaaaggtaggccactcgcctacctttctacaccagaggtgtgttgagatatgaagatacatttcttttttaatgatcactatccttattggtacaaggatggtgatctaatcttttggaaacctggctacagtaggaatggaaatagggctggacactacaacaaaaagactggatatttccaagtgtacaataagctgacaaatgttaaacgtggcagacatagggaaatttttgacatgttttacggatgtgtcacagatacttggcatatcgatcatatcgtctctaagaaaaattctactaacggagtgcctgtagacaagatagaaaaccttcaaatgttgaagccttgggataactactgtaagagagccttggaaaatgtgcaaagcaataacacctctacagtgactggtgtggtatggctgaaaagagagggtaagtggagggcaagtagaaggataaatagggtaaatgttaggttgggagattttgacactttcgaagaggctaagtctagggttgaatggtcaatagccaacccggaagaggctttaaagatagttccaaacccgcacaagaataatatcctgccaggtattgattggtctaagaaagatacctgttggagggcacgagataacaaaggaagaaacttaagatgcttcaacgacaggaagtggctaaatccgtggtgggaggcagtttgtgcaagaaagtcttgggaagtaaactgtctctacggagggatgtcactaactgagtggaagttatccagaggctatccaagaccttgtgttgaggattgatcattgacataaccacacggacgtggtactgttacctcataaaatgtttgagggggtttaaccatgaaagattttctgttggcaattttgttcatggcggcatgtctggcctgtggtgtcgtgtttgcaggtgaaacagcgtatcttgtcgatgtatatcgtgacaatggtaaacgtatttgcctttatgagacaagccaaggtgagctctacgagcttgtgaaacaaggtgaggcaggttcctgccctcgcaccaatttctttgaatgagggagaacacgtggaagacggacgtttaatgaagtctgaacgaaggcttattgtgcaactgatcccagaaacagcttggtataataacctccgaaacgctgtgaagaagagtgagtgggataagatccgcaagaagtgctatagagaagccaactacacctgtgaggtgtgcggcggtaaaggcagcaaacacccagtggagtgtcatgaactttacactttcgaagagggagtgatccggcttgtcggactgatagcactgtgcccggattgtcacacatcggtgcatcctgggttagcaaatatccgtggaaagtatgctcaggcagttaatcagttggctaaggtgaataagatcaccaagagtatggcagaggcgtattaccgagactgctttgcagagtggcgtgagcttagtaaagttccagaatggaagactgacttttcgtggatagagggttaccttgatggctaagagacctgtaaaagagaaattcgataagacagcttttgtattcgatacacctctggacgacatcattagaggtatgcaatcattgtatcggaaggctgaatctgagcagctgtcggaatcagaactttactggctcggttggtgggagttaaacctgcctaaagctgaaagttcttctctgagaactgttaaaacgtgcgcccaagaaaacgctgcacttggaatctaccacaaaaggaaaagatcaacaaaaagctctccaagaaagactaaaaagtcttgacaaaagtgttattaatctgatattatcggtcagatatctataaactaggagaactagatatgcttaaaatttttattgttgaagataaagatattgtccagttgtatgcaaacgagaatcataaaggtatgattctgaagaaggcaagcaaccttcatgaaaacacaattcaacctggcgatgtaattaagatctgtggttatatgataccagactccttgatgaaaataacccaccactgggggtctaatccgttcctttttgaaaagtattgggatgttgagtcacttattgcagagagtgatgatgcattccattacagcatccaaccatcttgcagaataactaacaggagggtctttgagtagagaatatccacttattgagtccatagattgtctggctgatcttcttgaacctgacgctatagtttattatgacttcgatcaggttgcatatcaagctgcagcaagttgtgaaaaaaggacaattgaggtaacacacaaagcctccggacgtaagaagatgtttaaaacacgaacagagttctgggggcggcagaagaacacagttggtggttggttaaaagctgagaataccaaccgtgaagctgcatgtaaaaaggctggcaaggagtttattccgtggacacgagaagatttcgatgtcttggatatccaaacccctgatcctgtagagaactgcttgcacacaattaagtgtaaagcgaatgcagtccttaattatctcggtattccggaagatcggtgcgtgggggtacttggaggcacaggtaatttcagactagatcttcccatgccggaaagatataaagccaaccgtaacaatactcttcgaccactgctgcttggagatgcaagacagtatctccaaaagcagtataatgctcaagtgatcaacggtatcgaggctgacgactggttagctatccagcaatttgaaggttggaaccactaccaaaaaacaggtaagttcaacaagtttattatctctattgataaggaccaaagaacactgccggggcttgtgttcgatcccatgcgaaacgataagggagattttgtaagggaaacccctatgctgatcgataacggtatggggaacatcttcatgaagcctaatggagaggttggtggttacggaatgctgttcttcggataccaaatgctgtgtggtgactctgccgacaatatcaagccgtatcaaggacttatcggtaagggtaagttcggggatgcctcagcattctacctactgtctcagtgcagcactccaaaggagatgtgggtggctattattgatcagtacaagaagtggttcccgaaaggtgttgttaagtatactgacttcaatggtgttgatcgtagaatttccgtaggtcaatggatgagtataatttttgactgtttgtatatgaagcgaacattcaatgatcaaacaaaacttgttaacgttcttagaaatgttggagcaatttgatgactaaaaattctgtagatagtgcaattatggaagctgtttttgaggatgatcatacaacagggacacttaaaacaaaaaatacattcgttgttgccacaggtatgtggcggttgtatgaagatgacaccatttcatacatcctgtacactgatgattacgcagatgaccgtgtatggtctgctgttttaaaagaggattgtgaactgattgagggcgagcggttatgcatgttccccagtgtggaaacagatgttaagctttgctctctcgtcttgttcaaagataaggcttatgctcctgatgaaggagaggaggatgaggaagtatgagagagcgtctattatccatagaccagtcgttgacacacacagcttgcgttgtatgggacgatggaaagcctgttcataaggttgtgttacgaactcaaagctcatctgcaaaagagaagaaaccagggacggtttcttttgcaacagctgctgagcgtattgactggatctgcaaacaggtcagatattatatccacacgcacggagttgacaccgtggttatggaaggactttccttcggatctcgcggggatgccacacgtgaactggctgggttgttttacggtctcgaagttatgctttgggatgctttagctgattgtgaaaatgacggcctgtttaaggttcacacagtgacaccaacaactgccaaaaagtttgctcgtagtcatcttcctgaagaacttgcttttgaggagaagaaaaagcttgacaaaaagacaggtaaagagcatactgtgaagaaacctgttacgatggataaaaagttgatggttaaggcctgcgaagtatctgaaccagggttcctagatgggatcaatttggtacaaggtaaggccgatctcgcagatgcttattggataggcagggcgcatctggaggggttatcgcaaagcgtaaaataagaaagaaagctgtcaaagcccccgttcatagcgggtggctaaaagattctaaggacatagccaactttcgaaaagaattgtcagaggagcaggatggtcttgatccgatcttgtgcgagccacttcgtaagccttgtttagatcatgatcatctgactggtcgttgcaggggtgttttgtctcagtgcactaatacctttgaggggtatgtgcttaaatactggatgaaatactgtaacgagtatacagattgcagtttatcagaggcgttgcgccggatggctgactatctggagaaagactacagcgacttcccgctccacaaaaactacagagatgatatgacaaagttcttgaggagatgctctaaagctacgattattgcacgagcagaatcagatctcaatcttgtcattaatccagagtgcaccaagcatgaggctattgagtcctacatgcaggagtttataaagaaaactgaggagagagatttctatggggatgaaaaaggtattcaatccttgcgactcagtcctgatcaggatgaaataccgtaactggaaaggtgttgttgcagatcgctgcgttactgagcctaatttatggtttggctctacagagtatcataaagaagagcagtggttgatgcatgcctttgatgtagacaagggcgaatatcgtgacttcgctttaaaagacattcttcagttttactaaggaattttgacgatgatggcaaagttaactcttgagcaaattttaacactaaagcagcagggatacactaatagacaaattgctcgtgaatttttaggccgtgagtcacgtgagagttggatccgactacagcttaaacgtgcacaagagaatatgtcagagattgtaggagaagcaacggagcgcttccttgaagaacacaaaggagctaaagtttgggtgtatgatacagaaacatcaccaacaaacggctggttctttgggcactataagaccaacattcaaacctgcggtattgaaattatgccctatatgctaactttcgcaggtaagtggttagacagtcctagtgtggttgactgcgctcttcccgattacaaaatgtgggatgaggatattcacaatgacctcgaattgattcaggacttgtggtattatctggataaatgtgatgtcgcagtagcccacaattcaggttttgactgtgggtgggcaaaccaacgatttgcatttcacgggttgcctccaacaagcccatacaaagaggttgacacccttaaaatgatcaagaaggcattccgtttgaatgcaaacactttggagtatgcatgcaaatacttccaacttgccagacagaaactgattgaccacacatttgaaatgtggatcaagtgtgttcatggtgatcttgaggcgtttaaacagatgcgggagtacaatgttggtgatatcctatctctggaaggcctgtatttgctggcacgcccgtttgctaagcagcaccccaacatgtcattgtactaccaggatgaggagccaaaagttcgttgcccacgctgcggtggagaacaccttcacgaggaagaagctttggcgtatactcaactgagtgcatttaaaacatatcgctgcgaaggttgtggatctgttgttcgtgaccgtaacaacatccgtaccagagaagaaatgaaaaacaccctgattcagataatctaatcaagtatagggaggcttgcgcctcccttttccttttggaggcactttgagcaagaaagagtccaacgacaaatattacacaaaccctgagtatgcagaatatcttgttggtaaagtaaaagataagtatggaaattgtgcatacgttgagccttctgctggaaggggttctttttcaaaactattttcagagatactgtcttacgatctagtaccagatcctgaatttgaaggaccaacaccgtgcattcaggcaaacttcttggaggtgcatcccaaggcagatgtcttcataggtaacccaccatttggcaagaattcatctttagcttgcaaattctttaaccattgtgcatcattgctagagcttggaggggctatagccttcatcttgccacggacatttgaaaaaatattttttgcaaacaaactggacatgtcgatgcaccttgtctacagtgaaaggtgccctaagaactcgtttctacttaatggcaaaccttatgacgtgccgtgtgttttccaaatttgggagaaaaaggcgtgcaacagggatcctgtagagattggggagaataagttattttcttttagcactccagatgactacgacttctgtgtaagacgtgttgggtataatgctggaaaagtattgggggaggatgacccaaaatctgaagaatcaacatatttcataaaatctttagttgacggtgttgacagagtgtttgctgaatgctattcttcttttcaagaagaagcaggtaagactgccggaatgaagagtataggtaagaaagaactacaatacattttggagactaggtatgatcaaaagcatagacttgaccaaagaacttactgatgcaaaagcttttggtgagacagcggtacaaagggggcaggcgatgggactggcactacctttcgtattaaaagagcactttacagattttcaacttatcaagggtgataagggaatgcttatcctggagcataagttgagtaagaaacgctataaagttgtttttaattctaaagctccaacaaaactgggattcagaacttacaatcttaacccatcctacactaagggtgttggaagggtagaacaacagcatttcagtgccagagcttctttagcccctttgatgctaaatttctcaggggtggctttaggataccttgataagaaaagagttcttcatgtccgtttcacagactttgtaacgcttctagccaacaacgaggttgatgaaaagggacgtgtaaaaacaaacttctaataacgcatagtatgattggagaacgcaatgacactaaagttaacaattccagacagcttttcagaagactttatcccagaaatgatgggtaagatgcgatcattgcttgatcagatcgaggaagctgtttgggaagacgatgctgtagtggctaacgagctggtagataagtgtaaaagtattattgatgcagttgaagaataccacggaggtttttgatggatattattgttcttaacgccccacccagcagtggtaaggatcacattgcagatctcttgttggaagctattcctaactcacaccaccgtgaggttaaggagatgctcttcagtgtggcaattaaggcagctggtgtaactcctcaactctggaatgcactttatgaccgccactacaaagaagagccttgccctttcttaatgatagacggcaagcatgtttctccgcgagaatggatgatccattgtagtgaaaatctgattaaacctatctttggtgaagatgctttcggtaaagccgcagtcgcatctttgaagaaagatttccctaaaggtaaaggggttgttgtttactccgatggtggattcaaagaggagctggcatgccttagcgagtacgcgtacagcacaggtggagatctgttgttgttccgtattcaccgtgtcggatatgactggggaaatgattccagaacctatctaagtctggaaaagaacggaataaaaggaattgagttcgatgttgtaaaccctgaaggtgcaccttgggaatgtgcatcggagattgtgtgcaagtatattgatgctaaagaggcccaagaagaatgttaatcggtattgatgtagatttgacactggtagattcaggaacagcatggtgggagtggttggagcgtttatatggtccagccagtaagacagtcactaaaccttctaatgggttaatgtattacgatctgtcaaagtattggcctgatcgccccaaagaaaacatcatagggccttttgatttctggagtgacccgttcctctacgactttcttaagcctgaagagggggctattgaggttatgaaagatttggtggctcgtggtcacaagcttgcatttatctcggtatgcaagaaaggtcaccttgcatctaaatcaaggttcttaaagcgttggactagtgattttatggatctggacgatcacacccagggtcacggcttctacgccacgcatttcaagggaaatgtggctgtagatgttataattgacgacaggcatgaatacctgaaccaattcgcttcacgccctgaagttattaaaatcctaaaagatacgccttatgagcaatttgaggagttaaaggttagtgttgactataccgctaatagctggtataaaataggaaagtttttagaaggtatttgaaatgggcagatgttctaaaggtggcgatcctgtagtcagatacggtgactggctagaggtgtatgatctgggaggtaagctggtgtatgcctccaggatcacccaagacatgtgctccgatatgttcaacagataccttgcatttaaggccaacataaacccagacgaaatttccaaaattaaaacaaggagagctaaataatgctaaaactgtgcactgcaaagatcattgctgacagcatttccgagaaaggtaagcgcatcacaacttttgagctagagtatcctcgaattattcactcagagcttatgacgcaccgagtgttcagccgaaacgccatgtcttcccgtgcagtgcctgtcggaaagatgctgcaacagattgtggagaatccggcaatgccagttcgcttcggtgtaaataagcgaggaatggaagatggtggggaacacgatcaaaagatccgtgtagagtacactgatatggagctaactccggaagagttttggaaagaagctgcaaaaaacgccgcttggcatgcagagaagtttgcccttgctggttaccataagcaagtatgtaaccgcttagtggagccttttcagcgcatgaaaacagttgtaacaagcaccgagtggaataattttttccacctccgttgctggcacgatgcggatcctacgattcagatgttagctaattgtatgtgggaggctcttgtgaatagcactcctgaaatccttaaaccgggtcaatggcacactccatatgtagagcacgtttatttggacggggagtttaactacgctgtacgtgacacagaaggaaagctctgcattctcgatactaaagaagctctgtctatcagtgctagttgctgtgcacaagtatcttatcgaaatattgacagcacgtttgaaaaggcagacagtgtggctaaaaaattgattggtggggatcgtattcatgcaagcccttacgagcaccaggcaacacctatggatcacgataacgcaatggaacgtttaaactactacctgtcttcatgtgaaatcacacaagacatcagtacttggcaggaaggtgtaacccatcaagaccgtgatggtaaattctggtctgccaacttttgtgggtgggttcagcacagacaactgcttaataaccacttcgtgaaaggttaatcctatcacagcgataggtaacttttgtgttgactaatagtattagataatctataataatggctcactttgttggtgagccagaaatggagacagatatgagtaatgttatgattcctaaaaagacatttatttcagttactttggatttcctatctaccgttcccgggtttaacgttcgcacacgaaacggtctccgagctgcactctttgccgtagggtttgatttaaaaagtattgatgttcttcgtggaaaaaacgttcgatgcaaaaataagccaacacattatcgaaaggcagatgtatttgctggtgtcatgcgtgcagactttagatacccgcaaatgtataacggtgtagatattttagatgtggataaagcacctggtgaggcaatgcttgttcaagatcttccgtatgatattcctgtagaggatcgtgttaatgtaagaaagtatacaaaacaatctgaaaaggctgaagatattcatattgttgatgaacctttcaattttgaagatctgcatcgcctggaaaaattattcggtattgaaagctaaggtggtgaagatgagtcataactccaagtggaaggatcttggttttgcaagtcggtcagagtatgttggttggctttggttcaacggcctgacaaatgatattaaaatgtatgatgatgtttattatgacgagtatacaggcaaaattataaatatctctgtagaagaggatacctttatccagcaagatactgatacctgccttgataaatacgttgatgaagtggaggaagcaaattgatcaccaaggtaattaaaagcaacggatgtgaagtggcattcgatccagaacgtttaaataaggcagctattttcggtgacgacggtaacggcaattggtcacatattgcactggatgcatacaaacgactgtatgatggatgtacaaccaaagaagttaaccaagctatcatagactcctgtgttagccgtaaagacgaagcacattcctgtatggctggtcgtgttcttattggtcagatttataaagaggcttttggagggtttacaaagatcccttccttaccatcattttacaacgacatggttgagaaagggtattgggaggatatgggatatagctttaccgagctaaacactttagacgctgttattgaccacagtaaagatctcggttatggctatgcagtccttaaacagtttcgcgacaaatacgggatcaaggatactcttaaagacaccttgtttgaatctccccagatgatgtttatggggatagcaatggctgtcatgaagaatatgccgaaagaacgtcgtatcaacgatgttgtaaaattatacacttatctgtccgacttaaagatcaatgccccgacaccgtacttaaacgggctgcgcacaggtaagacagggtatgcatcttgttgtgtaataaaagctgacgatacagcaaaatctattggtgtggcacgtgaagttgcgtacacaatgacggttaaccaagcaggtatcggctactatttatcatcaagatctgcaggtgatggtgttcgcggtaacactattaaacacatgggtaagattccatattatcgaggtattgacgctggggttaaggagaacaggcaacaatcacgtggcggttctgcaacagtatcattccttgcactagacccgcagattgatgagctaatccgcttgagaaaccctatgactgttgcttcaaaaagaatcaacaccatggactactccatcggtattaataggtcgtttatcaaccgtgtggctaagaatttagattggatgcttgtttcttataagcacgctcctcaactgcatgagggtatcttcaccatgtctatggaggagtttgatgcagaggttgatcgtattgctaaagatgacagtatccctaaaacatggatccgagccagagatcttgctgttgaactgatcacgcagcgtactgaggtgggaaggctgtatgtatactggacagatgagatgaatagacatacaccttttaaagatgtgatctattcaagtaacctgtgtgcagaaatagccctccctacaaaaggctattcagatatgcgtaatatcttcaagtacgatgctgatgatggagaggttgcattgtgcttcctgtcatctcttgtagctggaagggttactccagaggagtatgaggatgttgcatactacacggtgcttatgattgacaatgttatggaaatcatgacatatccgtatgaaaatatggaaagcacagttaaaaaacgcagatccatcggggttggccttaccaatgttgcacattttattgccagccacaaggttacttacggatctcctgaaagtaaacagcttgttcacgatcttgcagaacttcacagctacagcttgcataaggcaagtttacggttggcaaaagagcgtggtgtctgcgagtggatgcataaaacaaaatatccagaaggttggttaccaatcgacacctataacaaagaggtcgatagcgtggtgaaagatccttctcttaaacaggattgggaagggttacgtaaagaaattattgaaaatggtgggctacgtaatagcgttcttgaagcatatatgcctaatgaaagctcttcgctggcaacaaacaccactaacggggtttatcctgtccgtgagcacattatctttaaaaagtcgccacaagggcaggtgctgtttatcgttcctgactatgatgagttgaaagagtattacacctcggcttgggacgttgatactaacgacatgatcgatatgtatgctgtgattcaaaaatttacaggtcaggcaatcagcgcggatttatacatagactacaccaagttgaaagatggtaaaatttcaatgaaggagcagctagggtaccttatccgtgccactaaattcgggatgaagacatggtattatttaaactccagggttggtgctggtgactcattggcagaggaacttcatgccaagaaacaggctgaagatgaaaccagaaagaactaccctttgattgcagatagttcggttgaagatccgtattgcgaaagttgtgcactataattttaaaggggcttcggccccattttagaggttagaataatggctgtatttaatgctgagaacaccgctcataaaactggtgactatccgctgtttctaggacagcaaatgggtatgtatgactctatcaacaaaaaatatccacaactgtttgaactatacaaaaaacaaaaagagcaagattgggcagaggatgaagtggatttgtcgcaatctatttcagattttgtaacatgctccaagtcaacttatgacgtgatggtgcagaccttgatgtggcaatgggaggctgatagcgttgcggcaagatcgatcatctgcctcttttcaccattcatcactaatagtgagcttttcactctattgatgaaacagtcagagattgaagttcttcacgcactaacttactcagagattgttagacaatgcctccccaatgcccgtgagattatagaagagattcaggaaaaccaaaacgttctgagcagatctggcgttattgtcaaatacatgcaagagctcgaggttattggtgcaaaataccgactggatccttctagtgttgaagaagatgttgtgcggaaatgcattcttagagcgctttttgcacttttagccctggaaagtattgagtttattgcaagttttgcatgcactttcgcagtagctgaacagggtatctttgttcaggtggcgcagcttgttcaaaaaatcatgcttgacgaaatgctacattcgaaaggtgattttgccatcattgatatcctgcttaatgatcccacatgggagaaaagcttccttgagataaagggggagttaaaagagattcttgatgaagtacgaaccaaagagtacggttggagtgactatattttcagcgaaggaagggcgattataggtcttaactcaccgttgcttaaagaatgggttgactataactgctcaccgatttatgattactacgacatcgacaaagactttgtgccgccaacaaaggacccgctaccgtttatgcaggtgtggatgaaaccttcattgcaacagacggcgaaccaagaaatgtcgaacactgactaccgcgtcaacacaactgttaacgacgctgaagaagaaatttgggagttttaatatatgagctgcgaaaaatcttttttcatcatcatttacggtaaggataactgcccacattgtgtcagagcaaaagaatttgcaatcagcaaaggtctgccttttgtatataagacacttggcgagggctacacaaaagaagagcttattgagaagtgtagtccaatcgtcccccgaacgttgccgcagatcttcttagaaagcgatcttgacagtatccatataggcggtgccgacgatttcatctcttttgttaagaatggttttggagagaaaaagtgaaagttgtaaaacgggacggtagagaagagttctataacggaattaaggtgatcaaggcggcagagtccgccttatttgagtctggacatactgaagaagaagcttaccggatcgcctgcgaggttaatgaagttgttgctaacaatctaccaaccgaccagtgcacgatctctgtaaaaaatatccatatccttgttgaagacgctcttatggatatgggtttaaaatgtgcagccagagaatacatccagtataggcagacaagagataataacagagaggcaggtggaaaactgctcgcagatattagtggcttcttggatcgcacttgtgatgaatttacaaaagaaaacgcaaataagcctaccaatcatgtacacactcatcgtgacctgcttgcaggcatccttagcaaacaccttgcatcaacacagatcctgccagaccgtgtctcagaagagcacaataaaggcttcatccatgtgcatgatcttgactacttgatcagtccgttaacaaactgttgtttggtaaattatccagatatgttggaaaacggattcaacattggtaacgcccatgtcagtaagccgaagtcaataggggttgcaacaacaatccttagccaaatctctagtgcggtagctagtgctcaatatgggggtcagactatgagccatattgatcattatctggcacagtatgctgaagcgacctatgagaagaaccttaaattttgccaggaacattggttgccagatgctgagactgttgcaatgcaaatgacagataaagacgtatttgacagtatgcagacattactttatcaaatcaacacgttaacctctgtcaacggttaacaaactggccgttgtaaaactctcctaacctcataagaggggtcggtaaatccggctaacggggaacgctaaggcgaaagctatgccaatcccgtgactagttcttacaggagttggaacggttgtaacgactaacgaaaggcagagatgcttgacaaacatttctgaaccaagtagtgtaggggttagttgaaatactaacttcgaaatggagaggctctatgaaaaagatcattcttaatggtgaagaatcaaactatgtgattgatgaggttggaaacgtatacggaaaacgtggaatgctacacccaatattgtggggaggttatggaaaaggtaacaagcatgttaaacgccgttatatgtactctttcaaccacaaaggtaaaaagattcgaatccaaacctcaaggattgttgccttgtattgtttgccggatgtcccagaagaccctgaaaactgggaagtgaatcataaagatggcaatacattgaatgatcatccgtctaacctagagtgggttttgccggaagataataagagacatgctttccgaacaggactttgtccaggtaagtgctataggaaagtgcaggcatacaaagggaaaaccttggtgggtgaatatccttcactctatgcctgtgcaaaagccttaaatttgaacgtaggtaacgttcatagggctatcgaaggaaatgccgaaggtaagcatctcacaataaagggttattatcttattgaagtagagtaagagatagtctggccctgtggaaacacagggaggagacagcagactccattcatcacattaagtttaggactggatacctcggtctttggtagaatgattaccaaaaactacttgaaagtccacaaaatgggtcttggtgaagaacgtatcacacctgtgttccctaaagtgctgttcttcctagaagagggtgtcaacatgaaccctggagatcctaactatgatttgaaacgattagctctggaatgctctgcagagcggatttatcctgactttgtttctgttccactaaatcgtaaagtgacaggctcgacagatggtaaagtaacgagcatgggttgccggagttttcttagcaaatacaatgacttggaaacaggcgaggagaaataccttggtagatttaacttaggcgttgttagccttaacctgccaatgattgcggcaaaagctaagacggaaggtgttgatttctttgccgttcttgacgagtatctggatttggcatatgaagctcaccttgtaagggttaaccgtctgaaaggcaccaaagcagggcagaaccctatcatgtggtgtgaaggcgctcttgctcgcctggatcctgaagagagtattgataaactcttctatgacgggtacgcttccatcagtattgggtatattggtgtgtatgaaacctgtcagattttgggcagggagggtgacaaggctttagctcttggaatacttcagcacatgagagatgcttgtgagcgatacaagaaggaaagtagactagcgtttagcttgtacggcaccccttctgagagtctatgctataaagctgcaacctgtctggatcgtgaatatcctgaagtgttgaagcacgagcatgaatatctcaccaacagtttccatcagccagtatggatcaatagctctccttttgataagtgggagtatgaggaaggttttgctatgatctcctctggtggcaacatcggatacgtagagacaccaaatctgaaaaacaacttagatgctttggaagctcttgttgatttcggatataaacacattatgtattttggtatcaaccagcctgtggataaatgtctcaagtgtggtttctctggtgagttcagtgcaacagctaaaggctttgtatgcccagagtgcggaaaccatgaagagggaacgatcagcgtaattcgacgtgtgtctggatacctttccagtcctaactctcgtccttacaataaaggtaagcaagcggaagttatcgagcgagttaagcactacggaagttgtggttgctgatacttgacaaaagccacaaggatgtggcacacttagttcaaagattagagctaagaaggttcagcagtgtccagaaaacttacaacagatgagtttataaagagggcaaaagcagttcatggagataagtatgattactctaaggttgagtatgtaaatgcctgcaccaaggttataattatctgcccatatcatggagaatttgaacaagctacccaccaacaccttgcaggacgaggctgccgggaatgtggaaagctaaaaatggcacaaagccacattataccacataaggagtggttgaatgttatccaagaggtcaatccttatgtcgaagtgattggagaaataataagctgcagaacaaaagtgccgtgccgctgcaaaatttgcagtcatgaatggtcagcaatgccttatcttcttaaacaaggacatgggtgccctagatgcggcaagctaaaattcgcacaaagcagagctatagcccataccgagtgggtcgaggacataacgaagaaaaatacatatattgaaatagtagaaagggttaaaaatagcgatacaccagtattggcacgatgcaaaatttgtagtcatgaatggttagcaagaccatcccatcttaaacgagggcatgggtgccctagatgtaaaggcaatgcaaagagatcccatgtggaatgggtagggcatataaaggttgtcaatccaagtattaaagtgcttggaaaaattaaaaacggcagtgcaaaagtattatgtaggtgtaagatttgtgattatgaatggtctcctgctcctattaggctcaagcaaggacatgggtgccctagatgtgctaactacggctttttatcgtacaatcacggcaaactttacattatggttgatgacttagaagtaccaacacttatgaagatcggtattagcgtcagtgtcgaagagagaaaagataggatattgaaaagtgccaaaagggcaggggtaggtatttatgatctctacctggcgaaaacgtgggaaggatcaactcaaaacatggcagatttagaaaaatctgtgcataaggccttcagcaagtataaaataaacttccctgtaaaatttgatggtagcacagaattcttctactacaggcctgaagtgtttgacacggtggaagaagtatacaggaagatttgtggtaaatgatcgtagaaagatatgcatatcttaaatatgctattaactaaggaggttcagtatgtcatcgggtatctataaaatctgcaagtgcggttgtcattgtaatcttcgttggtgcaaggcactggacgattttatttggcattgccctaaatgtgatgcggagtatctatgaacattgccggatacacagaaatatcttacaccgaagggccaggtattagaactgccttatgggtatctgggtgcccacacgcctgccctggttgctttaatcaggcattttggtcaaaagataaaggaagagagttcactgaagaagacttgcaaaaaatcttgtcagatttagataacccgtctgtgtgcggtatctctctgctgggtggagaacccttagcatactataatgagccagatattattaacctgatggagaaaattaaggaaaaatttggtgacaagaaaactattcttgtatatactgggttcacatttgaccatatctctagcgatgttcttaaactggctgatatcatcattgacggtaagtatgtaaaagatttaccaaccaagaaaccgttccgaggtagcgataaccaaagaatgtttaaaaaagtatcaggcggttgggttcaggtagactagttgttgacaaagctttgtttagataggtataattatcgtaaaatgaaagcagaggaggtgccaaatggctaaaaaagccttgaagaaggcgtacaagaaagagattgcgcttgagcttaagaaaaaacacaagcgtgaaaagaaacatcatgaggatgaagagggggtgcaacagtgacacaagaacgtatcgatttggctaataagtttgtagatctcattttgccacggttagttactcaacatgcagacgctatttctactaatcttgatggcttacgtctaatgctaaatcgcacagatgaccctcgtattcgggctgatttagaagcctctgccaacaaactggaaaagttcttgcaagtagatacgcaagaagccttacacaagattatggtggaaggtttctctaaagaatttaccattaaagagcttaaggagctgatccaccaagaagagatgaatatccgagttcaggctgttgcaagcagcatggaggcggctattgaaaaactgttgcagtaaaagtacttggcacatctcaatctgaaaggagtcccaacatgggtcgagctaaagaaacaaaacgcatgcgtgatgaagctagagaggctcgcaaatctgatcgcctgcgtaaggctgctgagaaatttgctgacgaacgagagcacaccgctccagctctccgaccaatgaataaaaagcagcaaaagtatcttgattatctagggtcacgtaagattattattgtaaacggtgtgtttggatccggtaagacattcatggcatctgcatatgcaggtgatcttctgcgtaagaatgagattgataagatcattgttgcacgtccttatgtacagaccggaaaatcaagcggatacaaaccgggaacgtcaatgcagaagctttggccttaccttcgtagtatgatggacacgatttgtcgtcgtgttggcaaaggtgcttttgccgcaatgctgggagacggtcagaacagccgtatcgagatttgtgaagttgaaagcattcgtggtcgtagtttcgatgagcgatgctttgtcctgattgacgaggcacagcaaactaaccctgaagaaatgttgtcaattatcacaaggatctctgatcaggccacccttgtaattatgggcgataatagccaacgtgacatccctggtaaatctggccttgcatgggtgacggatttctttactcgtcatccagatcctgaggttggaatgatcagctttgatagtccagacgatgtcgttcgttccgggttgggtcgtcagattgcactcaatcttattgaggatcgtgcaaatcatatttggacccctgtttccgagtaatacagaagggtggttattccacccttaaatatctaaaacagttgttgacaaataggcaagctttagatattattatcggacaaaacaaggagaaggacagtatggccacaatacaagagaaactgaataaaatatactgcctgtttgtctataacggcgagacaattttggcatataaaggatccaagaatgtatggatcaaggacagtggtggtaatataatcaatttagcgttgctacgtgagcgccgacacagattctttatcgagtctagaattattgaaagtagtacctgctacagaacaggcgataaagtaattgttgacaatgatacgtggtatgtggtagactggcaatcattgagctgtgatgcttctgacaatcgtaagtactctatagtgattgctaaataaaggtaaatgtgaatcaggtttaaataaatagctttcaacttccaatattaaggatttctcatgaatttaacacctcgcagcaccatggtacacggcatgaaagaaaaacagaacggtttcgaacctatgagtaataaaatgttcggtatgccgggtggtattatggaaacatacagctacccaacaccagttgttgaccacgttctttatatcgacgatttggaagacttacaagatcatatgtctcgtctgcagacgatccgtatggctcagccggaagaaagcattcgggtgatcatcaatagccctgggggttgcgtgcacattgcaatggcttatctgcaggcattccgcgagtctcaggcaagcgttgttgcacatgctgaagggatgtgttgctctgctggaacaatcttatggcttggttgcaaagaacgtactgtggctccggacacagaatttatgttccactactatcaaggtggcacttatggtaacggtgtgaacatgaatactcaggtcagctactggaaaaaacgttttgaacgcctgatcgaaaaatactacggtgaggtgctgacagaagatgagatcgcatccatcacagctggtggcgaagtgtggttggacggagaagagctggcagcacgcactggagctattattctggatgaaggcaacatacaacgcatccagaacggacaaaaaccgaaaaagcttctggcaaaaggtgatgaggaaggcgtgttaggtgaagcaggtcttccggagattcaccagtgcacatctttagatgagttagttcatgctgttgaatctgcaaaagagggtggttcgaaaggtgatgttcacactgtgttcctgaatctgcagatggaaagtggcgagaccgtccgaattgccctgggtgagattacttcagaagatctgcagagattctctgtcgttgaacttcaggatattctgtctcaattgaagaccactctgaacggcggtgaagaggttaaggtgaaagataagactcgcaagcgtcttgtggacaatattattaaaacagcaaaagagctcaatgaaaaaatcctgggtgcaggaattgtcgaagaagcttaaacattaattctaaagccctcttcggagggcttttatgatctggagatttgcatgacttgtgctagaaaacctgatgaacaacgtaacgcatacgatgagtatgtgacaccggagtggtgtgcagaagggctgtatgacctcattccgttcccagaagattggacctatttggagccttgcagaaatagcgcctcaggcgtgttctactcccgtatgccgttaggatctgcatggggagaaatccaagaaggtgttgactatctgaatacagaatacaaccatgttgactgtattatcaccaacccaccgtacagcttggctcgtgagtttgtagacaaggcgttgaaagatgctgacgtagttattatgcttttgcgtcttaattttctggaaagcaaagccagatttgaatggtggcttgataatgcacctaccactgtgatcacaatatctaagcgtccatcattccaatcgaatggcagaactgacgggcaagcatatgcatattttgtatgggacaagaaaaaccgtctagacttgccgccatttatgtggttggcaccaccagaggcagatttgaaatgaaaatgagtgctaaggacaagttgcaccagttagcgctaaaacgtcctgtaacgctccctgacgagcttaactccatttatgatgcgattgtaggggagatacaaaataaagcgttagcaggctttctgggatgcggattttcgataaatctaccctcacatctctcagattacttcccgcatattgttggggatttgagggcaggaggtctgcaggtagatgttgttggcatctctccagagaaaaataacacggttgcctacttgacagtaacctggtagttgtgtattgttgttatcaacaagggggtcatttatgtacaagtcattttcaatttactcaagacaggcgaaacactacacagagatcctgattactcagaaaaaatctgtagagggtgagtgggagtatcaccataaaatgttgcgtccagcttgggtttttgatagacttattgctatgatccctcttggagaagtataccctctgacaggtcatagggatgcttgggatttaattgattacatagattcatttaaggagcccagtgtatgaagattgagatcactaaagaaggtaagaaagtgtctggagactatgcaacagtaattcgagatttaatgtttgaaaccaccaagttcggcacatctaaagttggtcaaacggtgagtgtgcaaggtaatatcacctcaggagagaagataatcatcgtgatcaaaggacaagatcctgtggaaggaacagtgggccgaggaggctacctgtgcatttctgaagaaccgcgcatgctggttgctgatgactccacaggtaaaaagcgggtatgtaacactgacgaggtgatgattatctatccagtcaacccagatgatcctgcaacatggattgtggggaatgaaatcttctctttagaagagttatccttcccagctccgcgctctgttcagtaataatttatcttaccagggacggtagaagtaggaggtagcatgaaagttaaatttcttacagatttagggtacccttccttggttgactgcgttggtaaaattgtggaagcaaaacgactatctgcaaacgataatgttgtcatggttaagggaaaagatttactatctgcaggtgcagagtctggcaggatctctcctgactatacgtattacctgtctttaagtaatctaccagaacgaggcggcaaaggccttgaagttgtggaggagtgacaggtatgctactggttgattggaaagatttttatggcgataaagacccgaaagcatttatatataagccttggagatactcagagagtcaaattgctgcaataaaccttacagcaaagcgccgaaaaattattgaaagtaaatatagatacgcccagctagtggctggtgtttctccacaggtagagggttttgtacttaaactgtacgaaaagtttatgaattacgatttgtcattcgtgaaggtgggcgaggatttatcccctggtaacaacgtaacccgttggaaagtttcgtgtgacaaaaaactcccgatcagtattgaggtgtgtcgatactgggggtatcatgattgtggattgtatgactaccatgatgtggaaataaagccacgcaatcatctaagcgacccagaaaaagattacttgaagcatgtgattctttccatgtttggagggtatatcacagagaaaaatagcgaagacagagtatcctttcttaacagtttgaaccaggagatgtaatatggccatagatactgtgttggtttggtattgcgcattgacctttctgacaatggttgttttagcaactctttgcatcatatcttgtagaaaaattaagtttgacgactttataactataatcactgccgcacctttttggcctgtcgttctcttcattgttgttatgtgcttggtagatcactgtaaaaccgtcagaaaaatgaaggaggcagataagaatggtaacagtgactgaaactgtttatactgttcttagggagattgcattctatacagaccttagttcagtatcttcatgggaaaagagtgtgtatttaaaatggtgcgtgaaattagaggtgaccttctaatgtttcaagccatgtttattgaaatgctctccggagtattactgctggtagccattttgggtggtgcggcactaatgtataattatcttgaaaaaggggacagtaatgacaaaaaataaatccttagaacaggctgaaaaccttctccacgagctggtaaaggagtggaaagttgaatactcagattttaatgcaagagagggggaagattattggcctacggagcgctcagagggagagtggtatcaagatttcatagaatggttatatcagacgtgtgatgaggggtgacgatgtttgttaaatatgtaaaaacgtgcctcaacaaccttggtagagagcattggtacaccttgcttgaaaaaggagaaattttaacaaaatctggaaagataactttgatacccttggatgataaagacccgtcactacttgtcatagatgattacgttacaggtgtgtcgtacgaggtctctgtggagaggttaatacgcagatctggagggccttatgaccgaagagagtatgttttcgattctgttacagagaaggaggatccgtctctaatgtttaggatggtaatcagggatatgaaatcatctataaataggatcgtaaaggacattaaagagccttttagggtaaaagttaagaagttttttgattctaagattaacatactcgccgttgtgctaggcgtaattcaacttctgttaattttgcactatcttgaactgttgttcaagtagtgtgcaacaaggcacaaaggatgtgccatgattaaataaactaagaaagaggtagagagaatgccaaagattaagtcggtattaatgtgggcagctgttgtagcttttgtaggatactggacttgggaaactgaattaaaagatatcggatataccagtcttgagagcaaggcatgcattggcataaccgatgcattcaggcaaaatgctatggatcacgaatgtgttgatgcagatatagatgagaaactgtctaaggacaaggatttttaccatggtcatgccttgcttgatagtggtgacactgtggaattctggtcgtggttccgtgaagatggaacaataaagacagcagtaaagatttccaacaaagagttaatgctgttgcagcagaaggaggtgcaatgatttggatatcctacactgatggcaccatgctgtataccgcaggtactaggtatgaagttcaggaggacgataaaaaatttatcgtaaaaacatttgacaaggacgacaaccttttgctagaattgacttacaaggttggagaggtatccgatatccaattggattgtggtcataaagataatccactcaaaaaacctggaataggcaaggcttcagaagaacgtttgtctcgtattgcagaaagcgtttctccccaaaaatctaagaagaggagtagaaaatgagtgacaaaattcttaaatttaatacctactatgagaatgatttgaacgatctgtattatatagtgcgtagcgaaaacccgaatgtagtactgttttgccgagaacctttcaaaggagaggagattgaatctaccatgaatgtggatcagatttcacacctgctgctccttggatcattaaaagaggcagtattctaaaccaggatggagggtttttatgaagcactattgtctgtctggcagaatgggtgcagattgtgattgggttttcttaaaacttgtcagtattcgagagttcattccagaggaagagcaagaaagtgagctgatgtcatggatcaaccattacggtaacacttttcggcatgttaaggtggaagagttgccaagcgaggctgattgactatgattgcatcaatattaacgtttatgggtggcgtggcattcggattcattgtttgcctgtttatagtgattatgtctatgcgaggctgaattatgaaactttttgagtggtttaaaaagtttaaatataaagctgtagccatcgtgccgtggtccattcagtgggtggacgatgagggattaccaattccaggtgataaagacacgggatactggatcatgcttgagaacgggttcggtaaacggaaatattcctgcacggatacctcaggagcatcttttaggagaattcctgggtataaatgtatgattgtgtggaagatgtctggtgtacctccggccaatgcacaatatcttactaccaatccaaccacagaagaggactagtaatgaaaaagatttgcgatacagatgtggagttcaaggtgtgtagtaaggagacctattgggaagtgagacaaaaggtatatttgtttggacttatcccatattggtccaaattctactggggagcagatgaattagggagatatgccaccaaagctatggcgcttataggtatagctgaatatattgctgctagggacagggctggaaaaacctgctactacactgctgacgagattcgtaacagtgtttacgtcccccaaccacctgaaggagaccgttgatgaaagttaaagttttagattcaagcttctatattggtcaggagcctttagtgggtaaagtgtttaccgctgtccataacgaagattatcctgaccttttaaaaataaagggtgcagatcttattgccgctggtgcatctcaggaatgctttgacagtcagtggacctacaactttgccctaggtgaggatgtagagatagtggaggacgatcatgaaggttaaaattcttgattctaacgtctacttggggcaatccttcctgaaaggaaaggtcgtacctgcggtatactttgaagggttgccgtgggatgatcctgtgcggcaacatcacagttatgtaggccacaacgtggtgtttatcttgggatcagacctgatcaccgctggtgcacctgaatattatttcggggaagagtcctattatgcctttggggtagggtcagatgcagatattgtagagctgtgatgggtaaccgttgtgaaaaataaactgttcaaagttacaatgaaaattcgcggagcttggagcgtaaagcaagggcgtatcccagaatttgagaaagatttctacgtagtctccacctcggaggaggctgcatgctggcaggctggctatgcctatgcaagaacctggtacgaaggataccagactgggggctatgacggagaaattgtcagcaagggtgtagaagaaattaatgtgttgacaagtgaaaaagtttttgttatagtgcatccagattccagagtgaagcattactggaatgccagaacaaaaacttggacaccgtttgcagactctgctacaccacttttaaaccaaaaagctcttgactctgccccgagctatggggttgttgaagaaaagctaaactgaaacagtgaggtgtcactatgatggatttaattctaaatattgataacgcagaagaatttaaagacgatggtgtaacaagcatggacaaaccctgctctgctaaggttgactcaaaatggacctacaagtttgacggagagatctttgcaaatgatgagaaggttgtagatgctgcagccattttaaacgctctagggtacgaccctgtgaattctttgatcaaggatcctgttgagtttgcagagtatgttcgaaaaatggcagatcttgctgcggatattttaaaaactatagacaacaagctgtaaaaactgttgacacaacgcttcagatttagtatcattgttttcaaagagggtttggttccctcttctttaaaaggaacacgttatgcaaattgaaatcactggcaacgtagaaatcactgaaggtatggtgtctttcatttcccacaaaatgtctaagctggagcgtttgcacccctctgccaactatacacgtgtgagtgtaaaagttgaaaatgatcaccaggaagtcatggcgttcatttttgacacttccggaaaagaagttattgccaaagctaaaggcagtgacgcttacgaggcaactgaccgtatggtagatgttgcagcacgtcagttggctaaatgcggtggaaagaaaggtaaagggaagggcaaagtaaagattgactttggagaatgaggtgctacaatgggcgtgattaagaaattagtaccaaatgtagagattgcatgctttgaaattatgtttgcaatcgcagttgtagttaatgtgttaggttacggctattaatatcaaataattgaggagacctctaaatgaaaattaaattattcaaaactgagctggcagacaaaaactgtggactggttgaaggcatgatcgttgaagcacaaccagtggactacatgaaggtagttcgtgatgccttgggtgaaggctttgatctgatggagccagctctgcgagaagatgttatcgagatggctaaaaagcacacacctgaaggcttggtggtgtttgttgcaccgggtaacggagaagagttgattgtaactcctgatgtgtatgagattgtagaagagtaatcctgcttggattagcatacttctctcaataaaaagaaaagtttgtaattatttgtgggaaaggaatccccatctcttgccagaggtgatactatatgattgtttattttaaaacttcaggtggataccctgattctcaaagcttgatcggaaaaacgtgcacagcatactcacctcttgatgaggaggtaagcgatattctacgagatatgtatcggattgatccccaagaagcttttgatcaaaaccttgtatttgtcaagggctcagacatgaagtctttgggagcattccctgaagcagatgatgatgccgtttattcgttcatgactccttttgaagctatggttgttgggtgagaatatgaaagtacgatttattggtgaaacaattcctgtgcatctccggtcgcctgaagattctgcagatcttgcatctcagaaggcgagaggttatgataagaaagtaatctcaaacgatgtagaacttgaggctactagtttacctgaccctgctgcattctttaatcattatggatactatttcagcaatctgatgaatatcggtgagcttgtgtttattagtggtggagaaattgttagcaagcttggcggcgatccggatgtctttcatgaaacctgtccttttgcatttgtggtaggttcagatgtggaagttattgaggaggtgcggtaatggtaagactataccgtgttgagtatagctcagatactgtatacaacgtaagaagcaaagatcgcagcgacagagtgcaagaaatgtatgttcttgccgacagtccgctatctgcagcgttcaaggcaggggctcttgcatctcgttggaaatttgaaggtggatctttctatgaagaaacccttgaagattctgttgttatttcttctgtagaggtttcagatgactacgaagggaaaaagttcgtaatgcggcacccacacagcaacattgcgtactactgggatgttctgaacaacgagtggaccccagatcttcagaaggctactgtgctaacaccgtttttggcagataagtttccaccagaaggtaatttatccgcactgtttcagtaattttcttgcacacaggtgttgacaacgccaaccctgtgtgaaataataccttcatcttaacaagacaggagaccgattgatgaagattaaattgaaaaaccttgaaacggcagagattcaggacggtgtagatttccgttctaaagatggtgacatcttagaggtaaatcttccaacctacacgctgattaaaggttttggcaacgttccggaagaggatattccagaaattcttatgatgttgattcttgacggaactgtgtttgtaggtgaaggtgagaacgctattgcaatcccaagccatttttatgaagtagtcgacgaagaggtgctgtaaatgaaagtagaaattaccggttttgatgtgaatgcggttccggaagatattttatctaaattgccggaaggttttggtaacggtgttgtggtggatgctgttcctcctaccaaagacattctgctgcagtatggtgtagcagaggaagatgttgataaagttcttacaatgatggcaatcgatcgtgttgtcgttgttaaaggtctcgataattttgagagtgatcctctgattattcgtggagatgactacaaaatcatcgataatgaaggccaagagttctatgagccttgtgcagaagatattcttaacttattactggaagcaggcaccgaagaggaggacgaataatgaagattgacccgttactgaaggctcgtgcagaaaaagcgtacaccattaagctgaccaacctggttcctacttgtcatccagatgtaggttggcccgaaggtttggtggagggaactgtaacagctgcataccttcctaacatcaaatacctcatggagatcttagagatggatgaggaaactgcagaacagttccagttggatatgaaacagagtgggactctggttattcacgggtggtataatactaaagatgcagaagaccctctggtaacttctaatctggcatatgaaatcttagggcctttgaacctggaggaagactaatgaaagatctggttaagattaagattaaagataccaatggggagctcagccattttggaattaatgatggtgacgagctgatcgcacacctgcctaccaaggaggttgtaagcaaagcagttgccggagaagaagctgcaatgcaggctgcaggtgtggatgaaaactatgtagctatgtgcatgtgccgagatcaggttgttctgtataaagcgtatcgaccaaacggagccacggagtggcttgtattccgacccgaaggatatgaaatcttagaggcactatgataaatcttgccaaggttgcaacggcactgttaattatttgctggtcagtaaccttaacactgtgtcttgtatttcagtgaggtgcttgtatgaacatcctgatgtgggttatagcagtggcgtttgttgcatgtttttgctgctgggttgcggtgaggatttctgtagctacccttcggaagttggggttctcagaatgggatattaatatcctttcttttcgcaatgagacaatatcagccgccctgctttgtaagaaattcaagtgggaaccttgtgaggtcatgaactatctaagaacgggagatatccctgaaagatttaaaaaagttcttgacggtaaggataaatgatagtatagtgactaacaagaggtgaggaatgacagattttactgaagctttaatgatggccttgtctgttttagcgctatcggtgtgttttggggcgttattcacatctctggttaaagttttacatacagtattattacccaaggagcgcagtaatgacgaagattgacttgaatgctggcgaccatgttgttgtcaaatgcatcggagattatcttggattcacaatcggcaatacttacgaggcggtagtggcgaaggtttatcatgataaagtcctcagtcttgtatttgactgcgatgatgatggggatgaccgatacgtctgtgaggtgctggcacgagacgatagtgaagaccagaaattcctggttattgaactgaacggtatttttgtagaacgttaatttaaaacaacataaggagactcttactatggctaaatctaaagttgaactgttcacctctcttccttctgacactgcagagcgtgatcgccttcgcaaaacaatcgaagaactggtggaactccaacttcagattaaagatctgaaagatgccatcaaggatatcattcttgttgagaagcaggatcatctgtattctcctaaattcatcaaatctctggtggctaccgagttcgatattcgatatgaggctgaaaaacgtcgagctaaaatcgaagaagaggttgagcacatgtccgaggcagacattctgttcaaacgctctgtagaataatgacaaagagaggggcttgggcccctctttttactatctatgaaggagatttgagatgggtataccgatcactgtaaaagaattgaatgaacgtgatgcaggtggtctatggcctgcacgaaaaatacgctgcgtctacatgaaagagaaccttgaacatcttgatcaacagatcaaggtcggtgatattttcgaggtcttctattccaatcgtcgcaactgggaaaccattcagccttctggttttgttcttgccaaacttgacactggagaagtgattatcccagggttggatattgtcttcgaaattatccaggagtgggatccggataagattagatatgaagagttattcggtgaaggtattatcaaacctgtgtgaggtggattatgtctacaaagacggctaaatactcctacatgccatcaacctctgcagaggtagattttagtttcgatgtgtttccactgtttgaggtggttctggcatacccaacaatactatctactccggaatcacttgtgcctgttaagttgcagaacgccatgcattctatgcactacaacaataaatgcaggcacagatggtgtcaggacgaggaaaaagatctggatagtttgagagattttgacagtcaccttttgacacctttcagctactccaaccttgataagccatcatgggtatagcaaaatatcaaatttaagacacctaggacgctctgtggcgtccttttctttatctggtgcacgattgcataccttggacagataatctccttacagagcgtttaagagcttcctacaaacaactctctttttcgagcgtagcgagaacgcacgtccgttttgacccaaatccccatacgctcggattttaaccaaaccctcgcggcgtttctattgacacattaccgctccagtgatagtatccacacatagtttgtagaatatggaatacacaatgagaacattgtccgaagttttagtagtgatcctgatgatcattacgtccatagcggctgttgccggaatactcacgggtggaacatgatcaacacgcatgcacctgaagagacatccgaaggagtgaccatatgtccattgtctgagccagtgaaagaggaaaacttcgattctgaagattctccatcttcgctccaggtagatcctgaggctgatgacctaacgtgggaagacatcgtagacatctggttctccattatgcctgagcacgaagagttcagaggtggtagactatgaagcaccgagcccacacaggttcctcatgctaaagcatggcctgaagaggcaaacgtgtataattccagtgcattggaacgtataaaaccctgttcacactctcatttccagaggagatttcatgaagatagaaatatttggtggagctgacaacactcgtggcctgatttaccttgaattcgatgaaacatacctgccagaggtgttaaatatagactctgttgctgaggctttgggagtaaaccctaaagaactccactcttgtgctgagatcgatggttgggaagagaccatgaacattgatttcagtgaagtagaggatgaaccgctggactgacacacaattagctgcccggctaaagtgctggaagcacctataacacatctttcaactaaatttcccaccaccacaatcacttacctcccacacatgactgtttgcttgtttagtgagcagtcatgccttgacattcttgcctatcctgataaaattaagttcttctcttttcttttaccgagtaattcgggttttctgttctcttcggtttgaaggggtatggagatacacctgagtgaacagggtgaacaaccgaacatttggctatggcattagcatggcgaagcggacgggtgacgaaagaggggccggaggacaccagtcactgccatatgatatatgggtgataacctgaagagtctgaataagtgtttaagtaccagtcagaggaaaaggtgaatggtagccgaagggggagggggtttcttgtatctttaatttgtatattatgtatacattcgtaaaccaatctcatctgaatctgtttaccacacaaagtggatagagacaaatattacctattaaacttgaattatttatagaaaatactacaacactacttaagtatttgattttacacacaaatcctgcagatattcaccccccatatttaacatacttgtaacatattccatactctacctgaccgatcaactcacccaactacatcctccatatttcccctgtctgtactacccctgcccagccgggagtcccgtcatatctggctttccagcaaatatcacacccacaaatatcattgcctgaagagggtttcatcccataatacatgccttacctgaagagcgcttcatataccccgtaaattttttaattgacaccctccccgccgccggagggggttggcttttcccacacagacccgaagagccagccagaaatatctgaacaggtccagctatgccacgattttgacctgacctacaggagtgcttccctgtcaggagccggtagcgactggagtgctgccaggcggacgaaatgggaatacttctcattcttataataattctcaaatatcgaggcagtgaggcaaattaataggtgaggccgttcacacagtggcacaacatttgcaacctatcttgtgtgggggaatgagaatacctatcattgtgagaatagttatcattacgggcaatttaacataatacccattatgcgcaccactggcgatccatacagggattgataacatgagttactgtttatgcatataacaattatatttcttactatttgtgtgggatatagttagcagccaatagattagatattgacctgtagacttctgaccgtccagacgtctaaacgcccacacaacaaggcttatacatacatcgctgaatgtaaacagggccgcaaaaatgctaccataccagattgtaaatttttcatacagcacttgacaaagaggagaaaaacttgtctgacactttagacacaatagtgacataatggtgacacactgggcatactcaacacactggatacaataacagttgttactattgcatgcttcactgttcacgtatagattgtttacacagagatgataagccatgccattcgtttgcatgacaataattaacttgtttacaatctttcactggctatgccaggtgacctttggtcaccccttcgggtgtttctatgacataatataaaagcagggcaactattagaagatctatagttgccttgcttgttatgtcacgattaactaaatacaaggcaactatgatctgattaatagtttgcagacaaactatcacgggggtgatggttactgcttttatattatgtcgcgactccgtcgcgccatgccattcgtttgcatagttgccttattgttacgaataaaacaattgcattgttaatgatttcttatctttctcttagtcatctaatgattccagtcagtatagtaatgtacagtaaacattagacgactaaagatttctctgtttattataactcaccgttataatttcgagctgtttacgaaaaatgttgacatcctagccgatttatgttatgcagtttacacgaataattattttatgcaggtattgactattccgttattctatggttggaataaatacttagcaggctatagactggtgagcgtacgtaaattctgagatctggcggctatagttatactcgatttttcacgtagaacacgcttttgtggttatgtaagtgcatgaattataagaatttttatttgttgacaagatattgaagatatgcatcaggttaaaatttatgcaatagcggcattacgtgcaattttggaaggaaaagcgtgtaaaaatggccctgctaccacacaatgaaaggttatgcaatagctattttacatgtatatttgtacagtgtgtgggattgatggctcgtcaattattccacttgccaggtagggccgtttgtggtaggaaaagagaagacaaaaagaaaggggctttaagcccctgaccgttcatcttgttgtattatttgttgctcatccagttttcccaagctgcctgataatctgcctcactacggcggatctcttcttgttcttcaagtcggatctcttcttccaggtaccccaagatgtcagcctttttggtctggcgtagcatccagtcatcttttttgcgggtaaagatcttataagctttctcgcaaacctcttttttgctacctttctggacttccagaacacgataagccatatattgaactagtttgagctggtcaagacgtttcatgatgtttttcctctttatgtggtttttgttcagtgggccttttggcccgtgtcattatcttattacttacggcggcagaattcaagcgtttttaattgataatcttcctcagcctggagtacaaccgcctcgatcatttcgttggcattgttgaagccataccctttagcgaactcatccgcaccaccttcgtgatcatgttctgcgttcatcgcttccacgaaatggaattcaagattattgagataagggcttgatgttccgtcctctttttcgatgagatcccaaatagcattaaaacgtgattcgacttcttgattaatccagcttgacataatgttttcctctcttctggttgttgtgtgggcacttttgccccttcaagataaatgttaccccaccacctggcagatgtcaacggtttttatagttcttatatgacaggcaggcccggtgattgtctccccccgtcgccaggtgcctgccgtgtaataagtataacaaaaaacaggaccattgcaagccctgttttctagttaataaggattatattttttcgcctatgtagtccggtcggtttttctctgtcatgcgctttagcaattcttgcatgttacttatggcttgtagtgtatcctcttccagacttgaatcaacataatcaggatcgtctatgacctttctatgattatgataacgcagtaccgccaatacctttctaacttgttcaacattcatttttatcgctctttaaaacaaggtgccaaccgtttctagtagatcactgaccaccaggacaatactgatcagcacatatctaaccataaggggaaagagcgccagcgatcccgccacaatccccaaggtaatgattatctttttcacggttaacggttaacgtaagctttaccgttcacggttatgggtagatcctccaggtctggatcttccttaaggtcgcgagcaagctcaccgcaccggataccctcgaatccgtagtactctgttgtaccgtcattaaaagttttagcggcaaggcataagcgataagtaaccccgatttgattgacggcatggatatccgttagatcaacctcttttgccagctctttagccattacaggcgcattaagtccaacaaccagggcaactactgcgatcatctttttcattgtgtctatcctctttctgctacgtttaaggcggcggtaaccgcctgtttatgttttgttggttaattttcgggtatcggtataaattaaactatgctgtacgctcaactataacaacggcttgagggatctcaccttcaaccactatcaaggcttttttctgcgtgatagatatctttacccgcttcagtgtggcggtaaaatctttcatttcgtcacgtggtgttttagtgcaatgccagatctcgggcttgccgatctgtaagctgcgcaagaattccgttttacctgttttattcgtgatcatttgattcaccttatccaataccgtgggaagataggatcatgttagccatagttgcaaccactccaaccgataatgccaggccaactactacaaccgtgaaaattttatctaacatgattctaccctcattaatgggcgttgccttattgccccgccctacgaaatacattctacctgatttacaattgttgtcaaactattttaacgataatcatcatatgctttattgacctggcgaatataacattcaaaagctagatcaatagatttatattcacggatatattcaccataggaaaccacatacatttctatagcttcctcatatgcgaggagaatagaatctaagcctacgatctcagtctttgcaataatagccatgatttttatcctctttgtggttggtggggcttgttgcccccatttgatttatatattacagtcttatatggtcatgtcaactattttcaaaaaatttttctgctgtgatatttttcccggtagggttcgctacttttaaaattctatcatgcaccggacgcccgaaagaataagatccgtatacagtaaaccaataattgccgtcaggctgtactattaccgtcgcatatggtacgcctttttcgtttttgctgacaaaatagatcacattgccattaatagcctcggcgcgtttaatttgttccatcatgatgattcacctatctttattttttcatagtttcaggagggggccttttcggccccgccaggtttatttattgatagcgtgcagcgggaaaggtacgccaggttgatagataacctttacaacctcatcaggacaaaagaaattgcagaactcaccgcaataggcctcatcctctttcaactcttcatcaacatactcaaaaaagtagtcgatgcttggataatcttgaccagggttataatcaaccatagtgaggaccagttcaagatcattgcggatgatatgcataccagcttttaaatacttcgcttccatttttactacatcgccagcggtaacaatagccatggttttaactcctgtttctgttaatgattggaggcataacccccctcgacaactcttattatccatattgtagggcttgatgcaagtacttctttaaaaaatttttaagtgccttggaggccgctgtaacgccaaaataataaaggccatgcaaccgcatagcctttatgtgattatatcgctgcaggccctgctaggggccttattttgcatcatttgccggaactatacagagaaaacatcgttcacaatagcgatcacaatgccgcccaccttgtcacggtcaacaatgcacaaatcaccatagatcatgtggtagtctggatgatctttcacggaatagtcaatgagcgttttcttgtcgtccagctttgtaacttccattctcataacgatatgagaatcatcaaaggcattattccgaaaagtcatagcctgaccaccatggcacccagtgatctccacttccacaccgtctacgatctgaccattaaagaaataaagattattagccaggataaacatgtttatcactccttgttaactgcgtgttatttttaccacgattaaaatttactttactgatggccctggcgtcaaggccatctaaaaataaatttacaggcctacaatctctttgattcgtttaactgctgcctcagcgccttgggggtagaaattatggtaaccgatcacgcgagtgatactaattgcagtttgatgatcttcataatagcccttgaagatttcttgaccgtcaatcagcacggcaattttttcttcttttttgaagttaataacgcggatattgttgctcattttgtttctcctttctggtttttgtgttggtggggattagctccccgttgattattattatccatatttcggaccggattgcaacaccccggaagaaaaattttttgaaaaagttaggcccccagggatcgggggccgttatcagttacttacagcgataaaatacatccctacgcctaacaatatttcaagggcgatgatctcaagccataccataacccggcgcaccttatcggtgcggggcttatccttggttgtcatcgtctccccctttcatcctggtagtagtgacgtggtttacaatggcccccaggagtaccatcaccacgcacatcacaagaaaaattatctctgtcgttgttcgatccattgttataaaattccttaagatcaggcctgaaaataaagcgttcgttattgaatccatcacgccaggcggctggcttcaaatcttcatcaaagggattaattaacgtggtattatttaaacggctggcccacatattttctattcctctcaaataggcgatccgcctcagttaaacaaatctcatgggcgtgatctctggttttagcttcatcgaaaacctgttgtgcaaggctgcagcgtagggagactggaagatcactataataggcgttgacaaatgtttgcgcgtcatacaggtcggaaaatactttaccctttctattatcgcctttgtcaacaattgcaaggataacaagtacaatagttgcaaccacccccaggaaaatagatataataaaccataaaaaggcggatctacccatcttgccagcgatccaggcgttaaacaaggcaactaatacggccaaaataataaattccattctatgtacctcttttgcagttctgtttaacaataaggcggcaaatatgccgcctgttacctgattaaaaattatcgccgtaaatctttccgctttctgcccacaccaccacgcggggcatactatcccacacgtcttgttttagattgagcgcgtgcaattcttcggtggtgcccataccaggcacgggctgattgtatactgcaaaacgaccacctgcataatcataggccagggttaaatcacactgaatcatctttttgatcatggcgttgagcatagcgttagccgcatactggtcacgttttaaaggcaactctttgattagtttgcgatagttttcaatgtgatcgcacactgtttcacgtggaagatctttcatatcctcgcgaaaggtaaccaggttaaacataacggtgtcaatagctttagtagtgtttttcataatgttttcctctttgttttgtgtggggcaaacgtcttgccccccttgagttttaatatagcaagtttttagattattgcaacactttatttatgaaaaactcatctctccatattcatccacatcaaaccgccaatcattggcctcaataaggccgatcaggttttcggtagtgaactgttctagataggcctcctccaggtctacgtaaaccttgcgggatagctcccgtaccgtctcggtgatcagctcttccaggtcttccactttgttttctttgttagtggcgggaagttttcccgtttacatgcttaagtatacttatcgagatttacttgtcaacactattttttaaattattgtggcgcaaaatgtttaaaatctcttcaacgtcatcaacacggcggcaatttttaaacgctaccaattgccccaagattttgatcactgggcggccttgccagtgcccctggagaaagcgcgctttaactttatcggtggaactatcacgccaccaaactgctttattattgcagtagtaaaaattattcaggacaacatcaactttatcaaaattttttaatttacgcatggcgtttactccttccttcttgctttgatgtggttagtatatccggactgttccaaggtgtcaatctttaaataaaatcactgttaatgatatttttaacaccataaaacggccctaggtgatgttttcaggtcaataaaggggattgcataggtaggggcttttgtggcgtttgtggggccaaccaggggcgctattcgtaggatagaaataaaaagccccgcacaatggcggggcgttggttgctatttgtctttatggcggtaccgttccgcctgtcgttcacgttccaaaagcaggcccggcagtttacgatcataatgattccgccagatcttcccaaatctttttggcttatttagtttattgttacgctggcggcgttccggcagctcttcggaatcatgagatcgctttacaatcttttcaaaattaatcttcatatattccccccttgctaacttcaatattggcctgaatagcccggatacggcgctttataacttcctgatctgtgtgatcgtatccccaaaagtctacaatttttgcgccccccgcttccaggcggtacagtgtttcctgcattttgtaagccgggatcggtcgcggtgttacttggtcaccttctttatttttatactttataatataatcttcattatcgttgaatgtccaaaatggatattctgcaagggcggtactttcctttttatcctggatcttgtttacaattaaagccgtagcaatagcgccaataataaaactagccccgctgatcatgtactttctcctttcattgtgttgataaactatctttatagatggccctgctaccaggaccaccgaaaaaccagcttatttgacgataccgacaaaacagatcccgccttcccctatataggcaatatcggtaatttgataatttgtcaagatccgcgtgttcagatcattaataaaatcggtcatcgcgttggtgtagttgtcttccgtgtctaaggcataatcccaggtgtaaacctttttacgtccgaagccttttaccatgatacgggcgcttttggtgttggtaggggcataatatttggtgattagtgctgccatggttttaactcctatgcattagttcagtgttaacagtataacgtttactttattgatggccctggagtcaaggccatctaaaaataaatttactcgttttcttccagttctgcaagctcttctttcacttcttcaagctctgtatgcaattcctggtattcttcatcgtcctcaatatccaggctgtcgatgtagtcgctaaatccgcagcggtaagcgataggatctagctccttgaggatacgcgacggaagaaaagaaatgtttccgatcataatttcgccgtagatctcgtctaaccattcatcatagttttcgtcgtacttgtcctcgtcgatttcaaagttatcgatcttgttctcaaggtctgcgatctgttttttcagcgcggcgatctgcatagctttttctgcggcggtcatagtagtcatagtgttttctccttttgtgtgctctgggaagttttcccgtttacgtgtttaagtatatcgatctaagttagtttgtcaattaaaaatttaagaaaaattttgcaaaactgttagcgctactcattaacatttgcgccaggatgtaaccgacaacgcaaacgataatagttatctttgtgtattggcgtgtagtgctcatcttaaagccccctttttcgcttagttgagattagtttactttattgaaggccctggagtcaaggccatctaaaaataaacttagtaagttttcagtactttaccgtccaacctgtcaagctggatctcgatagctgcagaaaacctattgtaaaccacatcgcccatagaatccaaccagtctatgacattatacacttgctctttgttcttgcaggtccggatccgtttcatgatgtaagccggatcaatattggtactctcgttggtgttcccctgtacctggtttgccgtattagttacatctttaatggcctttaccaccacctggaatggctttaaggtgccttttgcgttcatctcacgcgcttttgcggcgcggttgttatatgttacacaacggcggcaaatgttgaccaaatgcatgtcaataattttttcatcgtttgccagttcgttcatgatgcggcgtacgttcttattcatagcttttcctctgtgttggcgggatgttccccgccttttgtgtctagtttacttaaattttgcagcgtgtcaatgatttttattcgtgggcgcatgttacaatgtgctttttatagcctaggtggtcagcaagtgccgacaaaaactcttcttcgtagatccagccgtcggcagtgatccccatagcatttaatgcgctctcaagtgctgcgttagctttatcataaccgtgaccgcccgccttgccgccagtatagccgtacttattgttcttgttgtcgtgtatccaaaaaacgcagtagtgagtgttcccgctggcggcggcataataccggatctcagctacttcgtgcaaattattgtcatcgtccaggcccaccagattataagccttgtaaaatccacgatcacggcggcagttcttgacatcagaaaaagaaaagtccgcattatcaaaattaaaggtagtggttttcatgattttatcctcttagtgtcttttgtgcttttagtgtattttgtgtcaggccatatgtcaatacttattttttattaaaccagtggttgatctggccttttgtcagggcgcaacgattaagttggtgccgggtatagctctgaccgcgacggaatttataaaggccttgcccgttgttgatggttacgtccacctggcaaaccatttgatcggtgaccacctggcgagtgctgcgacgtactttgattccgtaggcgttcatgatttttttatcctctctgttaattagtgtggtgttgttcaccttgcgaggataagaataacaagaactgtccgagctgtcaaccattagttaaaattatttttgcccctgccaggttaaccatcattttttcgtactcttctttatgttccaacgctcccgccatagccttttcaaccagggcgatagcctcagcgtcattaatagctacattttccagggggattatattacctttcatttttgtacctccccttcaattgttacctatcctatagcataggcccaccaggtttacaagccttcattctctcctgcctggtcagttaggtcctgccaggctggccccgccaggttgcagcggttagcgcatcaggttagaaaaattttttgaaaagtgttgacagcggccccgccaggtggcacaatatacctatcgaaaggacggcaggcaccggtgacgggggagacaaccaccggggatgggcgctgcataaaatgagaacggttatcattatcatttaaaaatttatgcaaaaaatccttgctttctttgtcctgtgtgatactataataacaagccggggcaacaggggccgggagacaatcaccgggcctgcccgttattctgcaaacgagaatgattatcattcaaaattctaaatgagaactcctcgcatttaataaatttaattagcatgctaattaccctccgtaacaatttcctataaaacagtatcccataaaatattcccatatagaaattttaaaaatccatttctgaaaacgaaaaatcgatttcgtccccaaaaatttcaggtcgagatccggaacgatttccagaaaatccgattcagaaaacgaaaaacagatcgagtactgagaaatttatcgagaaaaattttcagaaaatccaagccatgaaatgaaaagtagatcgagtacttggaaagctgcaccgcaacttcaagatagtggttagattgttaccatagaaggttaagggcaagtggaggaagttctagtagagggaggttagcatgtgtgggaaatctataatggtggcctggaatatggtgcaaacgataggatgagttattcagcttgtcgcgcctactctgaaaaatccattttagttttcgatccattttctgattttctaagaattttaaaatatccagcccggtgaaatatcaaaaggaggaaatccattttagaaatcccccttacacttgatatgccaggaattttcaagtatcagctgtctttgtttttaggtttgtacatgcgtaaaggtatggtctttgtaacattccatttcctcaatccttcccagctccagttgtgggcgtggtatccggttatgcatgcactactggagtgatcgtaagcataagagaacgctaagcgcaccaggtggggccagtccttccatggttgtggaccgtaagcttttctccaacaccgacacaaactaaatgtctcaaggataggaaggataacaaacccatacactgtcaccaaaatagtcagtgcaatgattgtcaggaacacataccctgcagttgaaatgatgatctctgtcatttgtcgtcccctttcttacggatataaatgtgagaacctgcctgtatataaatttctcgaccatcttctgcgaagatgtggaatacacggtcaccttcgtactcaatacgagatatcttcataatggtctttccacctgggatacggatctcgtcccccacagcgatgttccatgcagatttaagcttaaacatctgcaccctcctttgggaacttgaactctggcatagccatatacgctacaacagggttgtgatcaaagtagaactgaccgttaattatcccggttttactcacatagttaccagatcctgcaagaacaacctcgcaagctccgaaatctacattgccatcctcatcagccatggctacgatatactttcctagaggcatgtttttaacgccgtctacaaatgtccaccctttgttcatactttatctcctgcactttcttaaggtaaccagtaaacaatctcgcctttcagcttcatgtcgtttccaacataaatttcccagccatccatcttagcaactgtaggcccaaagtcatccgcaccccttacctctttccaggctccgtagtcaggttgccagatatagaatccaccttctttgtcccatgctccgtacactacgtttaacaggtttcccattgcaacaatggtgggccgtgggaataatacatctacagatgcgccacaatttcgggtatcttttaagttgcaatcccaaaagatgtctgccagtgtggcggcgatagctttacgtctttctaatgttaccatgtatcatactcacttgttgttaataagttctaaaactttctgtcttactttgtcaaggtctgttgattcaaaaactgtgcgatatccccaactttgcccataggagtgactgcaatctccgtagcaccattgctcaatttgatagtattcaaggaaggggtgctgtctaactatgatgccatcccggttaaaaattaccataatacgtcgctctctgttagtctgtgcgtatattatacactgtagttttcagatgtcaatcttttacaggttactccagtatgctcggcatttacatttcgggcaatgaggctcttttatgtaataaccatcagtctttggaacactttttggtgcagttttaagattgtaccgagtaaaacaccggaagcaggttacctctccaacctgttgatcgtttatccactcgccagagtaaagctctctcttgtttctcataattctctcccaaatcctctgcaatcttataccaaaatctccagccagaaagcacacgggaacactttgatgattgaatctttacctggttcagcagttctttttccgtagggtaggtagaaataccctcctgcagattcgaacacagccccttcggttgtatctatcacagccagaattaagattttagtctccatagtgctccctctctcaatcgttgtggtgactataccatctcaaaaaccagctgtcaacactttttgtactccaccacgataatattcatatcaaaagtggcaaggttaataacgtcctctacgtgctcccacttcaaaccgcctatgccgcacccgatcttagggatgtagaatggtaaagtcgatccactgaatacctcattgactagctcaaagcctttcaggattgagaaatattcagcattaggccctgggtagaactgagtatacagattgattccgtagacaatacctctcggagataagtgctcccatcgggagaacgcacccagtttacttaggcaaccatatctagtctctttgtcagctgccaatgcttgagggaactcacgggaaatctgttttgctatccccttgcccattgtgtggaagcagttacaaccgtggatcaggtgaccagcaccgctcttaaaaagggagattaaatctccctctacagtatcaataatcacggtatgccagctcctcttccgcaatttcaaaaaactcagtccagcactgtggcatattggagttaccgaagtggctttcatagtaaaggttctcaccacttggaagatagaaatctgttacctcatagaatccacaatcgtcgcactcgccttcttcaaacttagcctcaaccttaataccgaggaaggtgaaaagtttatggatatcttcagtttcgaactcccagtgaatgttgttttccgcatcggtgtagaactggatcagcagaccattgtccagtttaccaaaatactctgtgaagtaacttccttcccagaaatctttatgacaaataatatccatgcgtttgcccataataatggtgtgagcgttttgggcatcgtcacgaatcagttttggcatttcatagatcatcttagttctccgggttcaacaggtggtggtgctacaggaagatcataaaacatggctatcacagtctcttacacaggaattgcttcaaatagaccgttatctataccgtccttcagatagagattatattctatgtcggtatctgtataaagggcagcatccagcattctatccgtgagtccatccatcgggtggagaaaccaccacccacgccagtcaaagtaacagcctggtgcatcttctcttacacggattcgataaatcatgggcagtggcctcctgttagctatacatcccagttttcttcgttcatcacgtcctcccgttctatgaagttataattgcacacctttcaacctgtgtcaacagaaaacttcaacaaattcttccacagttttaatgtcgtgggaaaaaggtttacggctatagcgggcaatagcactatcaaccaccgcccggtactccaaatcttcagaatatttcatgaagcattgcagcgtctctgggcagatagctaaatagctccaccacccctcttcagattggtagtcgaatcccatactctccaaccatgaagcatatactcctgcaccctctagccagtgggtattttcatcaagaaatttattcaccgacatgtgtgcttccaggcactcgtcaagctcttttccgttaaccagccatgcactgactgtggcgcatccgaggtctacagattgagttggcaggttgtattggtcatagttctcaggtttaacaatgatatcttctaatgtcatttttcagatctccttatacaaaaatgccccaccctttcgggcagggctatgttagttaggtgctaaaagtattcatagaggtatccatctggggctggaattttttcatgaatgtagtaatcaacacatattccggtttctcttctgcaagaattgtgggatacccattctttgagaacgttgccattcatgtccagcctccttacatttttacaccgtctaccgctggtgcttctatgcaacagaatatcctctgtctgcttgtctttattttctccccaagtcgttaaacggatattatcaaaagagtaccctttgaaatcatctatcctgtcacaagaaggctttttccttttgtcgtatccgctggctacccactggtcatacaactctttgtaaccgtttaggtatagccactccttaaactcttttttggtgtaagtcggaggtgggtgacctctcttcttactgttgcacttttgagtcttgtacaacacgcggatcacacctttttctgaagagtcgtgggaaaattggtcagcctccctgctggccttcttgcaacactctttgcacttattaagatgaccgtcagacatctttgggtgtttgtagaactcggagaggtttttcacctctccgcacttgatgcacctcttacaatgcgtggattctacttttgccatattgcaaacccaccggagcgaaaggtatgtcatcacagaagtcgtactgtgctggattctgatccatcgggtcatcttcctcatcatttacaggaggggcgtctacagtgttttgctgtggagctgcttcctgtttggcagcctgaggttcttgatggtcagttgacccagcaccgttcttgatccaatcgtacaacggctcagccagattagtcaagacatcttttgcttctacagtaattgccgctgcaaaatcatcaactttcgttttcttgtcaatacggcgacaagcgttcaacactgcattaccgacactggcacctacttcatcttcagttcggttggtggcttgagcatactctttcttaagctcaatggtgactacgtgcagtgttttagccacgcccagtgggtcgtctaccttaaacccgcgatccaggatgatctgcaacgcattgatgctatgccccgtttccacaccgatagggtcgtaagaggatttacgcttgccaccggagccttgagtgccgttctctgccttaggaggataggccttgaaaccactgataatgtttccagtgtctttgtcaacaatggctgcaacacgaccacctaccaccaggtctttaagctgctcatcagtgacaaccatagcaccttcgccaatcttgtggtcattaacagtaaccacgttgccaacaatctgagtcacatcaccatagatgcgtaaaacgtcctgattggcattctgctgaggtttctgcttctggccttgtgattgtgcaccttgttgctgtttttgctgctgagtcgctgctggagcctctcctgcacccagcttgaccatcttagccagtgagcctttgtaataggtcttaccgttatgctcgtttgccttcaaagggatatttacgatccatcctggcgttacggtttcccacttgtcatcaatcttaacagagacagagtcttgatgccccggtttaagcagcttatcacccatgctgatccagacttcttcaccgccttgaagcaggttatcagaggaatccagttcagaaatcagtaaagagatagtgtggctggattcaattttcttaccttgccacacggtggttttaatacctgttgcaggatcagcccctttaataggtttaatgctaacacgcttgatcatgccgtgagccagtaaaacagtttcacgcggattcatcgggttagcgaattgttgaataacgctcattatttgtctccttgttcttcgttagtgtttgccgtgtgtgcaaaccctgcttgaattaatttgtcctgaacttgagccaacaggcccattgcaaaacttgtggtcccagagagggccatcaacatatctcgttgttgagctacccaacctaaggcatagtccaaacgacgatatttttcttcttcacgcagagcctgaaataattgttcagcctccggttgttgtgtgagctcctgaagtcttcccatgaaagaagaaagcactagcaaaagagacacttgatctttacttaaccctaagaaaaattcttgaggttgttcttgctcgttcatcgcaaccgactcttgatcgttcatttgttccattatggaatctccgattttatttgaacaacatagaaggagacactattttagcatccccttctgtaaattacaataggtatttgttagccaatcacttcgaaagttccccaattcccgtccagcaggcaggtgatcggatccccatcgtcgtcaaagatttcaaagttttcagcatccaggatgtggccctcgaacacaatactttcgtcgccaccaccagagataacagcgtattccttaccttgtgtcaagttttgacaccctttgccaccaaaacctacttcaacacaacgtactttctgtcctgcgcgagcaactacttcagccatcttaaggtctcctgatattaatcgtcaagttcaaaatagattttaacagcttcatcaaagattggaatcccgatgttgttgataagctgccaaactaccatatctttaccggggtctgggagaatgtcaacctttctccatgcgctgtatatccagttcggaccaccttctgcactaactggcagattttcaccagcctcctgcagatacttatacagcaaaagatattctggatactctagaacactgtcctctgtagtgtatagcagttcacggtatacttttaagaaccctgcgggggtgatgttttcagtcttcatttgctgcctctcctgcattcatcagatctgccatagcgtcaccaacgaagagaacaaccacatcgttgacagcgtcagtatcatctttgttgacgttgctgaatttaggacacacagcaatgatcatatagacaccgttacccacctgaactgtccgtgtggtgcacatcatggcggtatttgtgccttctttgaaggcgaagccttgaagacgctcctctaaagtgttaccggtagatttcagaagcgccagctcgtccaaggcatagatgatatctccggaagttagtgttgccttgccatcagacaccataatcactccatcagcaccgtcaagcttagaggcttcaaagatatcaatatcccaaatatttttcatcacgcttcctcgtcgtctaaggagttgaagatttcaccgaagtattctaagacttctagctcccgtgtggtgcagaaaacacagtcaccgttgtcatcctcgataacggcctctttacccagcacatctacttcaagtttatcgttcaacaggacagcccctgtgtaaactttgtcggctgtgcagtcccgaaaagcagagtccttctccagatagtctggcttaaccttggctttaattcgttgatattgtttggtcattactgtggtcccctttcgtttggatagggccattataataggtcctatcactgttgtcaagtattaatgttcaggttttacaaaaactacctcgttaacagtgcaccagacagagtccccttcatcatctttaaaggtaaggcactgtgctgagttttccagctcatcaatctcttcttgtgataaaggagccccttcttccagaagggcttttaccaaagggttctcacaaaactctgcttcataaattgcaccgactgtgcaatctttaaaagctcggtcatttgcaacgcattctggcttcaaagtaattttcatcttggcagtctcctcagttatttaaaaatcaacgctctgtttgtgtgaagcatcttatatctaatcttacttcttgtcaatggctattttcaatcagccacgcagggtcgaggtaaatttgttggcgtgttgcccaatgacaaacttcattgtacatctgaatctctttgtctgtcaattcacgaataggctcatctataccctcatttttgtggtaatcccagtcggcatcgatttcccacagccatgacttgttgtcaccacgcttacgcacacaaaagtcacccggacggcctgccaatgcatttaagaactcgttctccgctcgctcttggagaatactaaggagcaaaacgttagaacatgaccgtagaatatgcttcagctcacaatcatcaatctcaacttcaatacgttgtttgactgtgtgggtaccttttactaacatcctacctcctctaaacgaactctgcaagggttgtgttgttcactgcaccgcagtaaatggagtatcccagcccattagagtgcagaaaccacggcgttccgaaattatctttcacgtagacatcgccgttgcttgtaaagggccaatattcttcgccaagggtaaaatacctactcataccttcagcaagatactttactttcataggtcctcttctacagctacaaacttggcaagcagggtggttccgtagatatgatactcaccgtttgccagatgggagataaaccaggcaatcccttcctcgtctttaatcatcttgtttgcacgatttttatcgtaataaacctcgtaggtctttccttctttaaagaatgacaggtctgtcatcttttcttctacaaaagtagctttaaccaaagttgtcattgatcggtctccttcttgttaagtctgaatactgcaataataacattcccaaggtgcagtgtcaaatcatttccaagataccacaacattccacggtcatctttgatgaaagggtaacaatctggtgccttccagacattgtacactttcccaacctgaaagaaatcaggccctgttgggattttggtaccaggccacacttgagatacctgaacacactccacctgcataataacagggatagtcatagatgtaaatgtttttgttggttctactaccataaaagtctcctctttgctcaacaacacttccatgtgttgatagtttacattagtgacaatcaccccaattacgaccacacaagtattcacctgtgatctggaacgggactcccatcattttagaagcttgccagaagcaatgtaccaccatttcgcccacaggactccagataagttcaagctttccgtcatcgttcaggataggatcgtacaccgtgtttccgtctctgtcaaccacttcgtttccgttttcatccttgcgtgcctttttgtacttatgaccgtcaaacacatgaagtttggcctcctgctctgccttaaatgcttccaattcttcaattgtgtcgaaggtgtacacagtcttatacttaggcgtgtcaggaacctgaagttggtactcatccatctgttcaggtaggtcgttaagctaccccgcaccattacgtgcatagccatacagtttcctgtatggatcggactacctcactgccttggtaacaaggcacctcccatttcgaccgcacttgctggcctactctactcgcttcttcacaccaacctgtgttggagctatgctttcgatagtctctgaacgttactaccaggtgtagtttttagagatatgtttccactgtcttctttgctttatagccctgacggtctcataaggatatccaagatccctaatctcgcattgtcgtagaccactctgcaacagttcgcaaatctctattacctcatcttctgtcagcacagcgttggcattatactcaccaactggccttactctgaggtcattatcataggcgtgcttgatatttccaccaggggtggtccattccaggttccagtatgcattgttgtacttattcccatccttatggttcacccatgtgagcctttcaggatctgggtttgatacaaagcattcagcaaccaggtggtggacaccttttgtgcactgcttcccctcgattagcatggttacgcaaaggtaacctctaccattatcaaaacaaaacattgttgtatgatcacgtttcgataaaggtattgttccatcatcaaacacggtatacccgtgataatcagctgttctagccattttaactacacccctttagtcttcgctgcggattagcatattgagcttttaccatactcaggtgtaaaagtcaacttagctttcccgtcaattaaagaggttattcgacatagatcactctatgaagccacaatgttatttatggtaatagataatacgacgaacaccttcatcgtaccacccacgcttcaccatttggtggtgcataagtatcccaaccaagtcacacagcgatgcaccaccattctgttggtatgcattaagtaaagagtgtttagatcgggtccagatggcatgaccatcaaaagagtagataaacttcttacccgttgcttcccagaatttctccagatcctctttacggcccttaagaccagggttggcatcccaaagcgcatcgattaccctttgtcccaactctggagagatgtccagcatatctgcaactttatctttttgtgccccgtacataaccccatacgtgataggtttaccgtcgttacgggacacctctctgcctgctacttttgtatatgcctcagcattgttttggtgtgcgtctccgttacttacaacatcgtaatacaggccgttgtcgaactcaaaggcaccccaagccccgataagctgctctaagttggacccgtcgataccgatctcaaagtatcctggaggaacaccccacaagctacgcatctctttacccataaccactttaggagagggtttaggcatgtttgcacaaatactgtgtttctgtctggaagtgtttgttaatccagagcttttagcaggaagcttatggtcaatcttcaaacgtgggtgattaagaagaccagtgtcaaccttatcctccttgattggatcaagtaccgatctgcggtttcgcaatgataaccataagacgatatctttagccatctctccgttcaatttttcaagattcggacacaggtgtccaaacgtatctttcagttgcggagaagtaataagtgccctagcttttctacgtattttcccgaatacttcctttttaatcctttcggagttaggaaagcttcggaacttgtgcacggttgtctggaacttagcatcagttttgttccagaagttgataattaggtcacaatactctgactccaaaagctcgtccatatatgcatatactcgtgcatcaacatctgcatcaggtaaagctttcttcttgctgtctttagttacatccttagttctccacattgtcggaagccaaccagcactgatcaggtatcgcttaatgtcgtcctgattgctgattttcataggtatcttgcagtccggcattcgcttctgctgtagatcacttattgcctgatccattagctctttaggtaaaggttgtggtgtggaggtgcccttaatatagcctctcaagaaatcagccatcttatcgtggtctttgcagcccatctcttcacaccattttatccccatcttactgacatctcctgtagaggtaaatgctcgcttaggtggggctttgaactctaaagcactcatgtccacaggatagccaagcttatcttttaaccatttccaaccattattagagattgtcccatcttggttaaacggcttttcagggaacttgggccgctgagacattgacagctcttttaaaggcagttgtggttcaacacgatcagcgatttctttcatccacgcatcgcaacggtcacgtaaagcaatagctccatctatgtcgaagtatacaccctgacgggcctgcagctccatcaggaagtgctgcaacatgcctcgacgtaatgcgttcttccaggtgatcttcttgaaccctttcggcttctctttggcaggatcgtacataaagttctgcatgtcagatttgccgtagaatacaccttttgattccgctaccagctctttccagagcagctcctggatgataacgtcctcaaatacacgatccacatacttccataacggaagatcgcgccagtcatcaatttgaactttctggttaccaagggcgtagccccatgccataaggccgtgaggaccaacaggctgcattttcttagtaaccgggttgaatacagagtccggacaaccttttggtaaagggcgatcaggccacaagattcggctcatcgccaacgtatcaaacaggttaacctggtgatcgttgatagtccccatacatttaggatcacggaacatatcaaaatgaataccagataatctttccatcagcataaagtcataactgtagcagttatggcagttcaaagctgttggtgaccagtcagaatttcctgtaagccaaccttccaactctgaaaaatctgctatgcgaacttcaaaatctttataaagagttttctttgccagaatgaagttcttagccttttctatatcctcctcggagtagtgtgtgcggtcatttagaggaaggaacagcataaaacggttcttattcagctctttaaacaggccgcagtgataataaagatctaggtcttctagtaaaccagaggcctcaaggtcgaaagaccacatactcatatacagttctccttaaaggggaggcggttgtactacccctcccactcttggttaaacattaaaaaggtgtttcatcgtcttcaaaaccgggaacagggtcagaggacggatcatcatacggaaggtcttcttgtgtgtcaacagggttaacagtaggagttacaaccttatcggccacaaccctacctacaggtgtttctacaactgcgtgctcttgatcctcaaacatagcttgaggtctccaaacaacctccccaccttcgccgtctgtgaacatctgcatttctttgtcccagtaccagttgctggcatcatggaacttacctgtgtggggatccataactaaggtatccgcaatgcctaacgtttttgctgggcggtttttaagacctaccagtcggacacgtccacgggaacgatccaccatctcttctgcctccaccccaacaactacccagctaagctgctccaatccggcactaccccgaaggttctcttttcgtacagggtaccagaaaggtaacggattcccatccttgtcctttggaggcacaatctctgtgcgtttcaggtgagcgatcaccaagataaatacattaaactgcttacagaacgcggctagttgcgtcatagccatgtcaagttctttgcgctcatccttaacattaagccctgaaattaccatggacaggtgatccagtacaatgtaacggcagtgatacagacacaccatttgtttaagcttagtgatcaactcatctacaggaatagacccaaaatgcttgaacactttgatttttccagccttggcccaagattggtgaatctcagcatgctcctgatcagtcaggaactgactagggtcttcaacaaactctttaacatcaaaccccaactggttggcgtatagagagttaattgcttcctcagggtcctcttcaaggtgaatcagacacaggcgatcatcctcttcataatcatcggctttagggcatgtcggatccatcaagtattttgcaatgcagtgctctagtttcttggctacagttgttttaccaccgccagatgggcctgtcagcatcatcaaggtgcctttgtggagtcctttcagcatcttctgcaatttagggaactccgcgctgatatctacgccattagaagtcttcttacgaagagattcaatggagaagtcttctaaatcagatacagcatcgggcacatatttgactgggtgacggaacatgttgacaatatcttccagctttttagccttcagcatgtcacggatatcttttacaccgtcagggtcgtttacctcgctagggtattccacgtggtaaacgttatcagccatcaaaaatgccgcgatattatgtgtggcttcaacacctttgataacgtgtttttgcttctctacctcgttagctgcatcgttgtccattgcaaggaccactgttccgtagctacggataaatttctcattgtttgcaaaagtatctactgcgtttgcacatccacagttaattccaacaaaaggcaggcagggttttcctgccagatcacccccgttgataactgcatcgatcccgtcctggacctctttagcccactgtttcacctttgccggggctttagcgttggtgagaatcccttttacttgtatctgatatgcagcctgccacgctgcaataacatcaccttccccctcacaaacgttaatttgcttacggttgttggaagatgcacacagcttttgcccaaacatctgggagttagcctttactatgccaacaacggagaaatggcccctttgctctttaggaatcgtccagtcacgctttttgaaacctgacagatttccgtagcggtcgtaatatgggaaatatgttgcagtgactgtcacaccgtcttcttgggacaatgctgatcgcacaccaaaatattgtgcagccatcagaccgatattttgttgtgggacagggacaattttagtattttctaaaacagtctctacagtttcaacttctttttcatcacgatagtctcgtttcacacttcccccacttttatacttagttgctttcgggtttggctcaccgaaacggttgtatgcagatgccataaatttacttcccattaattctgctccttactgcaggctcgtttgctaagaatacggcttttgcccagccacgtggtgtgaggcttcggatcatcttcgttcttgcactctttccacccagcttagcgtgttgcatggagtacccactaaccgcgtcaactatttgcgggacaggttttgtgtccgggattataaatccattacctatccagccgcaagttatttttggataggcatcacgtggagctataaattcaggaaaccaggggtttacatcatcctccggtaaatacccgccatagtcagaagggtgaaaacggtaatcaggtttgcgccacagtgtggacataacacccacaggattctctacatgccacgggcaatcgtaaatctctcctagctcttccgcaacccgagcatcctttacagcattaatttggatcaaaggatccttagccagctttttcttaaaatgtgcagcacctgataccgctaaatgcgtgcacggaggaaatgcaagaataaagtctggagctggatacatgcaaaaagtttcctgagggaaccatgggtcaatccaataatccacatagtgaatgttaggatgatcggttatcacctctgcataactgccgtggtcagcaccttctgcattaaagcacaggtacaggtacccagcttttgcccagtcaataactgcaccaccagacccgtcaaatagactccacacaacacctttgtggtagtgttctttgtagatgaatttcaatttgctgtctcctaatgcaaaaagccccaccctttcgggcagggcctagtgttaaacccggatacctattgtatactcggtggataccaatgtcaaatctaaatttaaaatttcttgcatctcataatatgcgtccagggttagatacatttccccatccttttctacatacttgtccaagtgcttgaggcatttcggataactatcaagtgcagctttcaggcactcaaactctgtgctgttgatgaatccttccatcttggctacccgttctggggtaatgatagcactgtagtgagatttagcctcctgaatgcaatgggtccaagcatcaaccttctcttcgaaaagtccaaagaacttctttttggtaagcttcagattctttaagtgcttaagcactcggttgccgattacagccacatcacgaaacttaagaatcactttgtcgatatcttcgcgacctattttcacaaaacaggccttacacatttcaggggaggaataaccaactttccacataaaatctgacataccaccttctccttattcctgaaaagcaacgatatcatatgaacttgcagacgatcctagtgaagaatgactccagtctaggttatcagagtagtcagcgtactgtgcaccactgcgtagtttatattttacccacttacctggtgcagggttttcaccaccttcccatacttcccagtcttctggcaggccgtcctgagggtagtcatccacctcactaataatcttagggtttggctccaagatccatgcaggctcttccttccgggtaagtgtccacacagcgtaggtatctgagcaggcgcatgatagcaaagtatatccactattcagaacttctgcaagctctttttcagcatcttctaatttggttaagtggtattggataatcttcacacctgtaatcatcagaaacctccaacttcttcagcaaatgcagctgctgtcgtcgctgcatccagataggactctagttcacgggctgcacgtttgtaaattgagtggcgcatatcgtttggcagttggtggaagtccacctcttcaccgttgtggtaaacacgcacatcggtaatttgtctaaatccgtaatagtcaacatcagagtcacggcactccgagtctggcaactggacaactgcttgagcttccacagtaaacatatcgtcaagttcgaaatcgatttcaaaagtgtatggtttataacgtttcatcgtttagtgcttccttagtttttgtggggaggagtgcctcccctttatacttacatcttactactggaggtcttcagagtcaagctcaaaaagaatcaaactgtgcatacctgcagagagatcaacacaccctgcaacgataagggtctgatagtaaggttcagcaccctcgatgtcttcgttaaaatccacaacaagatagtcacctttgttaaaggtgtatttgtccgatgtaaacgcaaaacctgcccagtcccctactgcaggatctttatcagtcacctttgttagcagtagatctttttcacgagatcttttagtaaaatcgtgaatcacaacatccttctcttcaggagttggattgccacacacgtagttaacgatatttctccacaaactcatacgtccccctcttctgctctggtttcaaaatctttcctgacaattttgtctaagtcagggaatgttgtattgtaaaactctacaactcgcgggtcaacaataatgtcaacttctcttagtggacgcaacaagtttattccttgtattgtcttaactcgactcaaagcaacatacgtcatccccggagagaaagctccgttctttccaaggtctaggttgtaacaatctagcgtaagtccttgacttttatgagatgttacggcgtacccagatttcagaggaagttgcttgtatgacccaatcactaccctctctataaacttctccatcttcctttctgcaatgttgtatctctgagagggcttatactcgttattctcccacaacctctgctctatgtcaacctgtgttccatcttcaagctctaccaccaccgccttgttcttaaatttaacaattgtggcacgtgttccgttaacataataaggtactttgtgcgtcgggtcaacatcgttggcggttatcataactttcatgccaattttcaacttcatctcctgctcaaccggcagggtggagggaaacttacccttcatttcaccagtgtataccttctctggggcgttgatggcatcatagaaccttctgtttacttcctctgcttgtttgttggtggcgcaaattgtgagagcatctgttggtacaccacctttgtaacagcgagcattaagttctgctacaacctcttttatgcgacgaccctcacgaacacagttgagcattgtggcaaatcgaatagactcctgtcggaactgatctattagggctatgttgtggaggtcaagctctttccaagattcggtatagcaacataggtccgtatggtagaagttgaagtaggcttccttctccatagaagagacaacagggagtgcctggtaaaaatcgccaaacaatatgacctgtatgcctccgaaaggtttgtcattttttcgaaggaagcgaagtttcctatccatctctataaacttatcagcacggatcatagagatttcatcgataattaggatggtaaatgccttgcttttcaaaggctttgctgtttttgcccttattgcggtccagtctgactccatgctcacacctgctgcaagatcgaaggttcggtgtgctgttgctccattaacgtttaaagcggctacccctgtcggggcaaccgttatgcaagagtctccatacattgactggatcatgttgatgagatacgtcttcccacaacctgcaggtcctgaaacgaagacattctcaccgctcatgattgcaacgagggcagcatctgtgcctacatcatactgccctttttccattacgcctcctcgtaaagaatgtcgatagtgttaccgtcacgatcaactacatattcaatagggtctccatctttgcgtgcttccggagctaccacaatctcatagcggcatgcacggcacttagcgctattgtgttgatatggcacactaactacatctgcagggtcaaccatgacagtcattacagtgccgtagctctttgcatactctttgctggcgcagtgtaagccataggagcacgcagcttcaggatcatcctctacaaagttacgaggcatggatacaaaagcaccttggtattgtgggactttaccactgtgccaatccacccacttgctgccgttaaactgaacccctttgtagcaaatgattcgaccatcttctgcaatctgaatatcattggcctgcataaaatcgtagagcatgtttacagattttgcagaaggattgcgtagcaggcgaacgaggaatttcacatagcggtcatccagcgttccgtctgcataatctttctcaattttctttgcaatggtggatcgcatctctacaccgtagtagtagagcttaccatctttcatgatcaggttgtctgcaagtgtggtgaactcattcttgcgttccagccagacaaggatttcaccaattgcctcatcatattcctgaacagagatatggtcgaagactttctggtaaatttcctcactttcgctgcggcgaatttcaaaaattccttcgttgcaggtgatctggaggagttccccgcaaataactaccaaaggctcgatgcttcgagtctgttgctgagacacactgctcaccacttccagcaccggatctttgacttctactaaaggttcttctgacttgattgctaccccagtaaaccccacaccgtgaacaacacacagtgggtataccacgacccaacgtttaacggaaccttcgcctaagtctaagatcatggcgtacttaccgttatcttccagcccatatctaaataaacgggcctcttcacgggtttcaaaatcctcacgggtgtagcagacgctgtcacggtcaggatcgaacaactctggggcaccaactgccagtgtccaggttgtgtcgcctttctcaatggcacatgtgaaacccttcttctcaagttctgcacggcggtcacgtgcttctttacgagttttgaaatgttcgtagatgaaaatcatcttggtctccc

SEQ ID NO: 10 - DNA, 169468 bp, Escherichia coli phage ECML-359
  source 1..169468: mol_type = genomic DNA
attattccttattggccgcttccacggccttcatgatttgagcaacgttctgtacttgttcagttgacatggcgttacggttatataaaaagtgtgaaacaatcgggtgattcttttcaaattccaaaaccattttatcgcttgttaccgaagcgtttttggtcaggtcgtcataaatcttattacaaaggaccagagtttcctgcatggtcttatcaaccgttccactgttatatgcgttataagcaaagaacttattgaactgcattaattcggcatagtcagtattcacatctttctgaacatcttttgcataaaaatacttgaacataaaattcagttctgcatattcagacaggataggaatataataacgcgaacggcttgaagcggcaatgtactggtccgcatcaaccgcatcaatcaattccacataacgattgactgcagcttcaatcagacaatcacactgcgccagcttggtaatctttttctgaagctgtggacgaataacacagaattcattgatttccaacaggtttgccagtttacacaatgtctgggtcccgaaggtcgtggtaccataatcctgattcaacggtgaaatgctactgcggttaatgaatacagcataaccatcgatttcctctgcatcagctgcacatgtaaattcttcaacagactgccatttgccattagttttagtccaacgaatcaccgatggagtctttgacttaacacgctctttcgggtccgcaaccggaatccagtcttttacaagggcagtcagttcagacgtacgatagatattaaccgtatcgcctttaaatcgttcctggagttgaaccatcaaccgtgtttgaatttcgctggttgggtcaacgaacaatagactactaccttgtacagtcgggactttaccagatgctttgagctttttggctttcgcgctggtgtcatacagcattgtactgatgccacgaatcatcgcaattcgccctttagcatcgtcaataacaatgttcaaggtattattctgaataccaaacatgctcgtcagacttgcagtattcgtattcgagcttgagttacgcagacgtttcaggcgggtcgtgctatagatatcatagacaaccccggcattaataaggtctttatccagctcgaacatttcgtacatctggttaaaagtcaattgtgattttgtaaatttcgtttcagcattacgagctttcagaaaattacgagcttcataactcagactctgcaattcgcgatacgtgtggcggatacattctgattcctgccatttcttacaatcatcttccatgaccttcttatcaagcgattcaatacgttcaacgatatttgctaccgtacgtttgtccagtgataatgcttcgcgagaaggtgcaatatccaacgaacccatcgggaacttaataaagacaacatcatttttggcggtcatccaggttttctttgtataaccgtcggcaattggataaacaattccaccgtaaattgcataaagaccataacgttctgggctactataatcaatacgcgctggagcataataatcatcaaattccgggaagtaattaatttcgttcacgccttgtacttcagccagtccagcaaatgggcgcatgatatatgcaatctcgtggcggaacttaccaaaatcattactatcaaccgggacaacaacttcaatccctgtgcggtcgccaggtttcattggttcgctaaaggttggcttaatctgtggaccatcaccatccatataagcgacataaccattaacttgaccatcatgatacgaaatcaggctaaacgtctctgtataactgaacggagatttagaacccagaccaaagccaccaataaaatcattggattcagccttggatgatgcaaagaaactgttatacagacctggggtattttcatcaccacgaatctggaaatcactcatacccggaccaaagtcacgacacacaaaacgtgggtccagttcaccaggagcctggacaatgaatttatcctgacaaccattgagcatatgagcatcaatcatattggtaatcagctcacgaacaaccgcacgcaccttgtttgtataaaggtcgctggtcagaatcttaaatacctttggagatgcctggattgtgaatgctgatgccttggcaccattaccaaggattgtttccttttcagtttctaaaatcatgtttttctcactttatgttacgtttgattaattctgcaacttcaagaagttcatcctttgttgcggtgtctgaagctattttaatacggatttctttgaagcgttctttaaactcttcagcttctcttatatcaaaaaatcgttggataacacggtattctttgtggacagctttatcaaacagttccatattaactttgaagtttgtcatttccaatctcctgcaatatttttctcatactacgcatggtagctttatgttcttggccatggtatatcaatgcaaggagtgcttcaattcgctcctcaggaaccttctggccagccttaatgctcatggctgatgctcttacagccaacaagtaacttcgcttcctgtcgctatctgggagctcctgtaccttcctcagacctgcttccataatacaacgtgcaacattctgcagattaactaaacttccgtcagacataatcatatgttcacctcaaggatatcttaacgcaatttttgtggcttgtacataataaaaaaaaaggacccgaaggtccttttggctactcaactttatagacttgcccatatgcggtatagtattcgccatcccaagtctcgcacataatggtgacaaaggatgcaaacagaggtttagtatcggcccacagataaccgtattcgccatttgacaacgtaacccaccactttttcatggacttctcctataagacgggagaatattctcccacatctatttatagtgtcgcattcatccaatctttacgctgctgggaatctttaccgaagagcatttcgaacagttctttccagttgtcgggcaattgaacaacttcgaatacaggttcgagcaatacgcgtttgtactcagcatcttccagagaaccaagtccctttatatatctgatagtatgcttcggaagtttatccttagcttcttcataatcaggaagagaataaaaccattcttgtttatctttgagctgcgcaataataacaggagttttcacaaagcgaattcgtccttcatggaacagctctggccagttactgaaaaacgccaataacgatggatagatactaccgacaccatccacatccgcatctgtcatgatagcaatgtttcggtaattcatattctcggccggttgtccaatcgttaacccagtaattgcacacacatcaaaggcttcggcgttcttcataacatcaacagctttcaggccccatgtgtttttaaacttaccacgtaacggataagcaccttgcaattcacggtcgcgaaccttgataaatggcccggttgcagaatcaccttcggtcaggaacagagtcgtttccagcttatcattgccccattcgttggccttgatatgcttttgcaccttggcctttgaagctttcttattcgccttggtctctgctgctttctctgcagccaatttacgggctaatgcagcttcaacaatcggcataatcagcggttcatttttcagaatagcttgcgcgattttcttggcatcaatcttaatgtgatttcgaatttcaccagccggagaagtcaatcgctccttagtctgggaatcaaatcgcatgttgctcatatcgcgaatgaacataagcatggtgaggcattccttaactcgtgcctttgtcacctcaatgcctttatatttgcgtttaatggctggctgaagatgttcacagatatcatccataacacattcaacgtggtgtccaccattctttgtatgaatgttgttgacataagtcaactggcggaaaccatccgggctagtcgtaaaggccatcgatactgtatcagtttcctggataacaacttcggttccgaattgcttggcgaacttcttgaaattgccatcaacctttttaccattaaaggtaaactgaatatctggataaacaaccgcaagagtctgcagacggtccaatgtaatatccagataaatccgggacaggctattttcttcaaagtgactgaagtccggaacaaaaataacagttgtacctttacccttagatttcttggtagaccaacctttgttttccataccattggagcagttaacggtgatttcatttgcgccgtcggcggtaatcccggtgaacaatacagagaaaatattggtcagagaagacccgacgccattcatcccaccagttttacgttcagcatcatcaccgaagttaccacctgcttttggaatagtccatgctgcaaccgggccagggatttgttcaccgttttggtctgtaaccattgcttgtggaataccacggccattatcggaaaccgaaatctgattatctttaatttggacatcaattttattggcaaatttaaaactggtgcgaattgcttcatcaacagagttatcgataatttcatcaatcagttttacaataccaggaacatagcttacggacttatattcaccaaacaagaatcgctcatgcgcttcatttgaactggaaccaatatacatcccggaacgttttttgatatgctcgacgtccgagagtactttaatttcattattaatcatcatctttcctcttgtgtatggaggtattataagtcacatattttaaagcaaaaaggcccgaaggccttttatttgaatcgaagctgctctaacattttaatagcttgtaggcgcccggcttcagttttaaccgtaataataacatcgccaccggtaacaacgatatcctcttttgattcctgttcggttatttcagaatcacattcctttggggtttcttcaaaatatttaaattcatcaccaaaaataagaccggttccattacgactatggaaagaaaatccagttccatcgatagtactaaattccgtcacaacatttgcttccatcttggtgactgaaaactctttggtagtaatcaaatcaatgatagaggttccttgctggttcaaaatgcaaccgggcataccgacatgtttaaggaagccatctaaatctttaatgcaataactctttccaattttaaacataatatcctcattcaaatcggatggttgaattcttgaacaacaaaccagaacaaacagttccttcaactttcttaccagttggacccacggccgtaaagcctgtgtgttggaaatcatctttaccacaagagaaccaattatatccggtgatttggatttgctcatagccgtttgcatctaatacacgaatggcgttatctgcatcagtacaaccagctaatgaaaccgccagcaccagcgctgcaatagaacgattaatgtatttcataatttctcacttagtcagcaggtcgtaaaaaccgccattaacatgtttaggggccgagactaaccgaacagccagccgatggcaatcaggacaaacatcattatctctttcagagattttcttgattttttcgtattctttcgcgcagtcattggattgacatttgtaatcataaagtggcatgttattccttaaagtgtgctttcaacatctggtaaacggtccaggcttcggagttattagagatggtgattttagtcaaagggaattcgcttggctcagatggagctgcgtcttcgcattcatcttcagtatcgtcatctttttcttcttcaaagaaacggaattcgtcttcctttatgaataggctcacaaattcaccagttgataattccattttatacacatcaccatcttcaattctgactggtctaaatccctcgccattgattatagcattggctatattatcattatctgtgcataacaaacggaatctgctttcagcaacattatctttaaaataataccacttatcagtttcaaatttagacattataaatctccttccaaaaatctgtaccatcttctgattcttcgcggaacagcgcatagctaggtaattctgcgtctttgtctgcatacacataaatgatatcagtggtgcaaagaaattcattgatgtttttcttcacaatcactttatcactttcagcagtgtcccaaaactcttcagcggtcagggaagtggttacacaatcttcattaaacataatattctcctcattgatagggcaaaaccctatcatttttataatttaggcaaaatgaatatcggcatactcaacgataaagctctcaggaacaaccttaaaggttccaaggaacacgatattatacagtttgacaccttcttcaacccactggtctgtgatgtaaccagacatgctagtggtttcataagtcggaccatactgacaattatattcaaacggtttaggtgaaacaaaaaagacacctttgcccaatttccatttaaaatcaaccccaacatgagactggtcaatagtttcaacttcttcggccacaggagcgatgtacccagtaaattcggttgattccaggaatttaggatgcacataagccaattgagtttcagtctgaccatttttaggaatgatgcgcactttaacttctttaattccacctgctaaattagtgcgaagacccacaacctcaacaaaacgaccagcagctttggaacgagattctttagaaacacgtacaatatcaccagcttcaactttcataattttctctcttggttaataagtttattctccagtggggtcattatactccgaccccaagagtttgtacactaaacttaattaaaaatttgaacaaccatggaacgtgggacaacagtaaattcaccagcatggacgacgttcaggagttcaaccccatcttcaatccactggtctgttacccaaccacaaatggaactgttaaatgggcgtttgatttgaactggtttacataacaagtcaatagggtcacccagttcgctaacttcttccagcagtacagattcacgcggataaaggatagcttcaagattgtcacctgattcattgaccgcagtaaattcaaagatgctttggtgattgtggtacttaactgttttaacggtaaatggagcaaatccaaaaatacctttcagtacccgccacccggcatgcattgcaacagtctttccaaactgactggcatcttcaataagctgataggttttaccaactttgatgggagtttcttcaacttctttgaagagttcaatctcagcttcataaaccataattttttctacttcatttgtatcaaggcgacgtgcatgcaaaatatatgctttatcaaaccagttactttttacaaaagtttcaacaataaattcaccttcgcctaaagcatcagtcagagtattatacccagaaaccatagctgcgttttgaataataggttcaatcagttgataagttttgttaatttcaatagtcatattttgtttctcaagttttaatggtttaattgggcgaacatacatgcttacaacatcaaagtcaataaattctggtttcattatgtaaccttattgaacatcgccagttggttaggttgtacaaccataatttcacgacggccttttgcgtttgacacgttcaagtagatgcctttgttcatgtctgtttctttatcatataccgcaattttattgacagtaaagattttaccacgaatatttgtaaatgcacattcaaacgcttcagtcagacctgcttcagcagcttgaagagcagacatttcatattgttggccaatttcaaaagaagtaatcattttgttatcctcatcagtagttgatgagatgattatgtctctttccattggccttgtacactactttttatcgttttttcggtaaagataacgggtctgcatcttcttcggaaggaacttcatccaaaccaagagcatagcgctgggcatacttaagcatcaaaatatctttcgcgcagtcatgcaccgaatcatgcgccacaaatccatctaaagtcccctttggtaatggagtttcacacatcttacggacgagtgatagggcttcgattgctgtcctgatatctcgctggttccagaatacaaccggctccaggccataggtattcaattcacgctcgggaataccctcattgcgctgtaggtcacggataaggtcaacaaacaacgggaagtcaaaagacattccacgacaccacataaggctttcgtatttgttaattccattaccattcagataatcaattgcctgttggataccggtcagagtatcaacatcttgcgcagaaggagccaagttaacacgggcttctgctgattgctttttccaccaacccatggttgttgtatcgaacagacgcttacctttttggtattcaaggctaaacttgatacgtttgccgcgattaaccagggtttcgaatgattccacaatagcagggtcagattcgaatgtaatcagagccaggtcaataacggctcccttcgagccgtttcccagagtttcaaagtcaataatagcatcaatcatcgcacatctcttttaatttttgaatttcaccagcaaccatcgcacatctcttttaatttctgaatttcaccagcaacatagtcggagataaaaatccctggctcttcattgttaaaatattcaatcgcggccatacgtttccgaataagattcagttccagcaaaacgtaattaccctgcacgacgatagtcggattatcttcgaaaaattcaaccgcgtcctgaataccatagataagattatctaaatcttctttatgtactttatacataatatgcgtcgtacctcgctcgtgtgattccaacataagccaactggctcgctaatgaagcttcggccatatggatgcatggagtatagatgaatgctttgtccactgaaacgccctgtgccttatggattgtactgaccggaagagcacggactttcaagaaggtcctgcgcgctttccagaagtctttccactctggacgtttaccagcggctttcatctgtttgtatgtgtcagcaactttcgccagatatgcctggaattttggttgctggtcttctggtaaaactttaatgcggtcaacctgatattcttcatcttcatcaattgactcaacttccaggtcccagtaattaatcactaactggtgcgattcgcctttacaacggagaatggtggaagtgtatttgcaatccttgatgcgaaccaactgaccattattaaaaatggtttcgctgaatttcttaccttcaaattccagctctttcatgtgcggctcttgcataaccaggacttcatacggtaaaaatgctttatccgtttcatagagcttgcgacgaataatattgttcagtttttcaactgatttattcgtgtatgcatacatcctgttttccatcaacatatcagcatcttttacaatactgaaatagtttaccatgaaatcctttaaagcggtttgtgaggtgaaaccttgcacgccatggccttcatacatacagtcgcgaaaccagccgccattgcgaatttctgtcgccacttcaatgataggagcattgcttcgcatgacctcagtcaaatgaatctgtttgaacttagggtgcgtaaagaatggacttatcttttgttgtgtacttcctgggtcaaccggctgcagctggtgcatatcaccaatcccaagaatagtacaccattcaggaacagagttaagaataatcttaaacagagacccgtcatacatacttgcttcatcacaaaccagaacattacattttgacatgtcaggcatttcgcgctgttcaaaaacgttttggtcttcatatgtcgttgggttaatcttcaagatactatggattgtattcgctgtttgaccagacaatttagataaaacttttttcgcctggtgagttggtgcagcaagcacaattcccataactccattacgcactaagtggtcaatgacaaattttgtcagagtggtcttacctgtgccagctggaccattcagagtgatacattcccctgaacgtcgctgaatagcttcagtaatataatcaaaagcttctttttgtcctgtgttcaagtcttcaaatttaatcatgccaattttactcgcttaacatataaagtatctaaaattaatttcaattctcgtgcgtgttcttcagtaggaaaaacagtttttgtttcccacttatcaaaccaccattttctaggtgtgcatactgtttcaatacgtcccatgcgtaaatagcggcttgtagtatatgaatagttagcaagttcatattctgcgcccacttttgtggtgtataaggtaacctttccatcatactccaatgggtgttcaaaaccatctttatctttgtggaccagcacatatgcgtagtacatcacattaacctctaatcagtttaaaaattgacgcgttcaaaggcagaccacgtttcagtttaaggcggtcaatgaatgacaacttatctaaacgctccagaccttgaataattttatcatacatatcgtaacgcgtttcagcgtcagatgatttcattttcagacgccagtcaggaccacccataaccattttcagcccacgttgactagttccgatggaagccatttgtccatggatacgagccttgactgcaatcacagaaggggtggtatctttagcgccacttttataaagctcttttaaatgtttttgacgcttcttgattccacgctcggtatctttaatatttttaacaattttgcgaattttataatagtcagcgggagttactttaaaactattgggcatcttagaaccgccattaatacgcaccgccaaacgagtctgtgcacgtttaagttcatcaagagataaatcagcacgtaaaccgttgtacttagttttgacagggataacattgccttcaatataacctatatcattgttaaagcgttcaaaggaaactttatcttgagttgaattttcatcaaaacgttcaccagaatacgcacagaattcttgtttcaaaagattggcgatatacttactagacagattgaaatccttgttacgacgttttgcagacgttttggtatgctcgcgacgtttgtaaacttttaattcaaactcttcttttgacatattcatgatatttttctcatcttacggacgtgaataactcagtacggaatcattatatactattcatctttcatgtacaccactttttcgcctttaacgcttttatttttactgtgtataatggttctaaggtctttggttagttcaaaacagtcaaatgccaaacagtatacagggtattcaatgggtgtgtttcaatcaagtctacgcggagcgtagtcccagcgggaaacataaactcatcttcatcattaaccaggtgcaagtttgacttcctggttgcttctggatatgcaccattgaactcttcaggaggagcaccgcaaatcattttgaagattgcttcctgatagttatacgcatatggtgcattgtttatacagaaaatgttccttgtgccatagaaactgtatgatgcgaaatttcttgcaacttgccagtccctggaaaaactcattacacgattgaattcaattgttgcaccaacatatcttaaatcttccaggtattccatggttttctttgatataccacggaacaatgctgccggcggtgcagtattcagattgttgcggataatcctggacaagtcttcttgaatcaggtcaggtttattttccatacactgccagagtactgattgctcattatttgtgtaaagagcatcaatctccgcttgacattggttacgaaaagactcactagaagcggcagtgtcaataattccattcaaaacgtcatcagtgtacagcattttattatcctcatcagtagttgataggaacatcttaacgtgtcttattgctcttgtacacagtcaagaacataataatcatcaataaatccagcatcaactaccacgaatttctggtcaactggaacaaaccattcaagctcagaatcaatcatgtccatgtattcttcgcgccttaatgtagctgcccgggcggaaccagaagctgtattgaagaattccagtggaacgtcaagcgcgattttgcgcattgcatcatggtagcaaaaagctttggtctgattcaatctgacgatagtcctagtcacatattccattgcagcaaaatccctggcaataccatagtcttctgtaaaggaggttacccgtccaaattcaaaaggttgcattgattcttttgcttcatctaataaatcaatctcttgctgggttactccgcgccacaagactgtatcgggtatagacaaccttgacttgatgattgagttgacatttgaatgcaaggtcttatcaacctttgatgtgcggcattcaaataatgaagctatctccatttcactaaattttaactggttgggttcggtatcagatttgatgatgttcataatggtctctctgttgtaagaaagaccattatgtcattaggaggggagtaagtaaactacttaaacactccaagtggaacgccaaagactgcaatgtctacggccatgccaataggagattgatatgatgagttaggagattgatatgatgagtaagaacttttcgattctgtcggtcgttcggctttaattgtctcggattcagtcttaagcctttgtaaccgattaattttttgttgctcgatttccttatgagcatgtttacggtcgatatccagcgccgatgtgggaatatttgttaaccagttcattgtttcacccatggtgcccatggaggtgggtcgtcataatatgaggccaggtcgcgtagaacttccaaagggaggctaaaaccgtgcttctgtataatcgcatcaagttcgtcaactaggtccacacgggcttccgtaggagctttaggctcttcaaaaagttcaaataaatccattagtaaccaccgatagggccgtaaccatacatacgagctcggactttagtatcgtgcatagcttcttctgttaaagtaaagcgcagaccaatatcaaagtgtttccaaatctgacgttcgacttcagcaaggtcgtcggtagtggaaatcagatatgtgcgaccttgaagacgttcagtggccattttatctctatctttatagaaaatggtatcttctccataaaggtctgggtgacgatagcctttgatgtgcagagcttcagaaacagtaaacggacacccttcggcaacatcaacgttttttctatgaaataccttcagcataacgttttctggcatcgtcaatttcattaattttgtttccaatgcagtgaccgaatccatgccattgtaaaccatgataaggcatgcggtagcatcgtaaggtcgtgtttgacctgccgaatcacggacatagaattctaattcatatactttcataatgttttcctcttaccaactaatggaccatcaggaactttattttccttgatgtacttttcgttttcttccatcattttactgccaattttcaaaagcaaatccagtgcttcttttgcccggcgttcagcatcttcttgtgtcatgatttatctccgtagatatcacgcatcagtttaagcgctgctcgttcagtcttcttttcctgcatggctttaagcccgttaacggcccattcttcggcttcgcgctgcatttcttcctcggctctggccacccaggaatcatcaatccctggagtaaccaaccaatctttaagccaacttgtaattctcatttaatcacacgagctggaagacgaatcacagcttcctgaatcataggaggaataagacgaatcaccggtccacgaactaactgcggcagcggtgaccacaatcgaagtagtatcgatactactttgcgcttgggctctttgttcttgcagtcgagttaaacgtttttgtaagtcttcttctgacattgtagaatataggtcttttgatttcgatttgaccacttcttccatcatgccgtcacccatgtaaacatattctcttagcttaacatccggcaggctaaccggaaccacaccttcgccaggtttagtcttgaataaattcttgagccaactaatcataggaaacctcgtttaaattcaacttgaccatcatcataacggatttcaatattgaattctaaagagtcatcgtcatgcatcatgaatgaatgtacgataacttcatcaaacacacccagaccatacttaaaatggacatcatgagcaataatttcatctaaagctttgtttggtttaatccaacggtttaacatagtattctcctctgtaattgaaataattataccgcttctattaaaagcaaaaagggaacccgaaggttccctataattaaactactggggtaggcgtaaacatcgccgcgttcttagttcgccaatcagctgcactagacgctacggtgacataagcggccttttcggaaggaaaagtctgatagtgtgcattcgcaatacgatgctcatttgaatagatttcaaacggaacagatacttcaacacctttaacttctttaccttcaccagctggatgcgtaaaggttttgatattaacgaaaccacccataattaactcctttgttgtttaattacgggtgtatttataacttaataaccccggtcctgacgagcgaagttttcagcatttttcaggtaatacagtttaaagatttcttctgctgacagaccaagaccatggaacatgttcagaacaaagtgcaggatgtcaatcatctcaaatttaatttcgagctggtcttcaggagacaactcatcaatacgacgattacggaattcagcatgttgggctttccacggtttccaacaacttgaggctgctttctcgccattagacatacccccgagagaagtcagaagttcacggaattcgtcgtcgacataatctttctggttacgaagccatgcaacaacatcacctgcagtagccaattcatctggatgtgagttatattctggtttttcagtagccagacgaacttgcaatgatttctgcatatcaagcataatctgcagcgggtcaataccttttgtaattgcattgtcataagccagagcagctttatcaacgccagcaatcagttgggaacactcgttaaaatgagccattatattttccttatcaattcatgttattttgtatgttaattatatcatattggtttgaagcataaatacacagaaggaggatatatgctcaaactatctagtctaattcaagccatcaaaggcagtcgtaagcgaacgattctggtcctttcgatactctgtttagttctactctggaacttcgttgttgcccctgttgcattgacacatggtgttatattaccagtcattgcactcgaatcagttgtagatattttactggcattaatcggccttatatagatggaataatgtgaatattattccatcggatttggaaattaaccagtaagaaagacaaaaaacatcatgggctttttagctcttgatgtttttctgcggaacttaccggaattccttcctaaacttttgcgtacttcgaaagtcgcattctcgccatcaacccttgagcaacgttatcggccatatatgattcgatttgttcaggggttgcgccctccgatttaaccatctcatttatgtctttcgtatgccatggtgcattgtcccagaacataacggcttcacccgcttcaacgagcttcttcatacgtttaatcgtatccggatgtcttggctcgttgtccattacccatactcgggtttcagcataaggaacggcttccaatgctaatgttccaccggttatcgcaatgctgttagggataaacaaactatcaatcggaccttccattacccacacacgtttgcgctcatcaatcttgtctactccgtagactttggaagcttctgggtgagctttgattgtgatatatttttgtggtgcatctttgcgaagagctcgtccttggaaagattcgatttcttttttgccgttgaagataggaataaccaagcgtggttcattcgtttcattcttatacgtcccaggattaacggagttaactaatgcaggccatttgtttgtaaaccataaccggttccaaacattgctcggaatacaccgactttttacatacttaactatcggatgctcttctggtaaagtatcgattctttcgcaaaaagcaagctcttcaataaccggagttttttcttgttctttcggagcttctgcaacttcattacgttgtcgaccgaaggcgttttccttgtacttctcaaccatatattcccggtgcaaatccggctcaaactcttttatgtatttgcttatatgcgtggagtagtcacagttaaaacatttcacgtaaaccgcaccatcagacggattggtatacgcccagaatcgggccttgtgtgaatctttctgggagtcaccgcaaaccttacaacgacagtttgccttaaatgtgctcccggtgacttctctataacgtggttgatacgataaagctctgattgcaaattctctatcaatatatgacatagtttcctcatttcaatggccccgaaggaccattatactgtaggtttatcgtctttattcttacgcttttttgatgggatttgttcagggcctttattgacaactgccccggaagtggtacctgttgcgatattagttgggtttccacctgcatcaccggcaaccatatcttcattgataaaatctttgaatgttttcataacaaccccctttccgctatttatacaacgaagatagctttatcgccatttgcatcagtcacttcataggtgtcttcatgatacaacggaataatccaggtaacaccatcatcagcgataacatggattgcttcttggtcttgcgacacgatttcatattcttcaaaaatctggaagaccgaaatcttagagcccgtacacattgcagtcatattaacctcgcttcatgaaagcattaaaaatctggtcatcaatatcagtaggcggttcttgagatttaacccagccagcatccagaatgtcatttgcttcagtagatagcatgaccccaatttcaggatttccggttatccacgctgcacaatcgcgtacattctttttatcaaatggatagccacgagtatcttcataaggcccattcattatcataaatgagcgagcctttatgataacgccatctttaacaataatataaccaatcgcctgattataacgaggctcgcggaattcataatgagcattaccatcattatttttaactaattcaaaattcagataagacaaatcgctttgaatatacatattaatctcgcttcataaaggcattaaaaatttggtcgtcaactgaatatacaggggtttccagaagtttcaaaagactgtttttaatgtacttacccgggatacccatattaacaatactgtcattcaattcattgttaggattgatgtctttaaattcaaacccatcaaactcaaccttgtcaggaataccatcagcgaaaaaataaaccaattggtgcattgtattgcgcgaaaataatttagacttgactgcaataagttcttgccaatggtttaattctttgttaagaagcttatgagcaaacgtaattctatcatcactatcaacaagaaaataacccaggtattgaatttcgtcgctccaaaacacccggtatgcctgtgtatttggatttttacagcgaagttttttgataactaaatttctgttaatcattttattcacctgtaacccattgaacaattttgctattgtcaaatgaagcatcgcaatacagaacatagttatactgcataacgtcaccagaagtcaatttgtcagatacttctttaaccatatcagggcggtcacgtttagttatgttcataatatcagcataaatctgatgttcaacatcagtctggtcagcagtcatagaccactcacaaaggtctttatcaagtccagcagtaactggagctgtaccacatgatgctacggtaagaattgccgcgattaataactttttcatttcaatctcctcagtagttgatagggataatatacagcattatccctttgttgtacactattttaatgcatcttccagataaattttgcggaatttgcgttttgtctgacgaatctgacgcttggtaggtttcacaggaaattcgaagaactctacgtattcttgttcataatcattgtggccgactgaaagaactagttcccagctgcttacggtgcgttggataaacatattatgcttaccaaaagatttattccaaaaagaactaggggtaggtttcattaatgcgatattcatttaaatttcctcaatgcgggcatcatattcaaaaactttattgtcattaacaaaggctttaaccagcgcattattcacttctgcatactgcactgtaacccattcaatcatattttggtcactaacatccagcgcggtttctttggtaaacatattaccattttcaaaccaaccaataaatactacgttctctaatttatacatttagatttcctcacagaaggcccaggcagcgtgataaactgttgcgcctttagtatcatttaaacaaaccacgtcaaccggtgcaatcacacgataaagacggggttctcctccatatgagcgagctgctcttcctgcatagatacgcgccaaaccaatatcttcagtaaaaaacacacgccctaaatttttcttacgtccaacttctgacagaacaccagttgcatcaggaggacaaagcatattttggattccagcattagagcttgacccatgataataaactttgtattctgccttgcaatcaatggttttcattttattctccagtagttgatagggtcattataacataagaaaaaggggctgtaagccccttttaaaatattttaaaatttcatttgagcagcaaggtcgtccaggtcgctcctgttgaccctggtttgtcgattcatttcagcctggcgattcatctcaccggtggcttctttaaccgtaggaccttgtttaggagctgaatcatcatcaacctcgtaccagcgctgattacctttcttaacacccatcttgaatttattatagtagtttttatcgccgtaacgagacttaagctgtttgattaactgcagtcccatttgagcgaattcttcggtctcaacaacacctaacataaagtcagctgtgtgagcaataccaaaggattctgcgatgtcagccatatcaatctcggctgcaacgttcgcgcccctggttgtctgcgctgcagtccacaagaccacatttttctcgactgccagaccacgaagttcttctgcaaccatcttaatcagaccgtaactattttcggtaaacgttttcagtcttgagctcgcacagattgccaggtagtcaacaataatcacatccggtacaaacccttgcttcagtttgtattcattcagcaacgcgcggaaggtatctgcatgagcaccaccagttggatattgttttatcttcagagtcccaagagtcccggaagcacgccatttttccatcttagctttatattccgcccatgatatatgcccttcatcaatatcatccagagacacatccagcaagttggcatcaatacgtttggcacatacttcttcggccatttccatgcttatataaagaacgttatgaccagtctgaagatagtcagcagctaacgaacaaagtccaagggatttaccgacgttggtcccggccagtaaaacgttttctgtaccatactcaactccacccttcgtgattttattcaggatgttaatgcggaatggaacctttttcgatttgttcagataagtctggaatctagcctcgtaatcgtttaaccagtcatggccgagggcagaatcaaaacagatagataatgcatcacgcatgatatcagggatagcaccaatatccgggattcgtttatcacgtttatctttcggaagttcggcattactctggatttcgataatcctggatgtggcattgaacatcgcagacttctgtacatacttctcggtttctctgaccaaccattcctggtcttctggagtatcggccaggactcctaagagtttctttgtgccttcgtattcaacttcagaaaggtcagaactgtcgagcgcgatatcaagtgcagtcttagttggcaccgcctgatattcttttacgtgttcgttaatcgtattaaaaagggtcttcgctggacccttttcaaaatatgtgctattcagatatggccagactttaacaaaatattccttgttaaagagtagctgggataaaatagtttctaccacttccaccacctctttttcattttaatcttatcaatttcatcttgtatttgcattgtaacacacttttctacatgcactgcaagctccgctttgcggtcttcagaaggggtgccgaaatcaactgaaacttttcccgatggttcaattttaattccggttacgtacacaatgtgattggacccatcggggagtgataacagaatttcctgtcgtacggttcccatggattgccggataatctccaaacttttttcgtagtaaggcacagaaggagccttagctccctccgcatctttctcgaaattatctaaatcagataaatcgatatcattcatcaaggtcttccatcatatctaaatcgttttcgatatctgccgcagatggttttgccttaccttcaggggcagagtatttttcaaccttggaggcaataagcgcatcaacttcggcgtcaacaacagcattgctatcgattgcacccagctggtaatgtcgtttgattgcatcacggaaaggttcgtgcttgaacaacggaccccagaattcggtacagttagtatcttttgcacgccatgatttttcttcgcggaccatttcaccggtctcaacatcaagatattcacggttataccaaccaactttcggtttcaccacaaatccgatttccattgccatatcaagcaggccagaatacgggtcaataccaccatcgaattttacatcaatgaagaatttacttttctctttgaccatacgagatttttcggcgttcagaacaaattggaaaccttcaagttctttaccagtttctttaatctggcgtttgccgataatgaatacggtgtccgcagaatacataacacctgtaccaccggtcataacggttttgctatacatctcaatcgtctcgattgtatggttaaccgcgacacaaggaatatccttgatactaaaatatggggtaacaatacggaacagagatttcagggatttagcacgagtcatatcgccaacgactttttcgttcatcgcatcttctgtttcttttttagacgccatgttaccgattgagtcaatgaagataatgactttttcaccacgctcaattgcttcaagctggttaaccatatcaactttcaattgttcaaccgactggattggtgtgtgaataacacgttccgggtcaactttcattgcacgaagatatgcttctgtgataccaaattctgaatcatagaacaaacagattgcatcggggtatttgttcatatatgcagagaccatcgttaaacccatattggatttaaagtgttttgacggaccagcaaaaatagtcaaacctgactgcataccaccatctagtgcaccgctgattgcaatgttcagcattgggatttttgtacgaactacatctttatcattaaagaacttggacttggtaagagtcgcagtcattttggatgtagaagctttaatcaaacgggatttcaaatctgcaatagacattcattttttccataggcaccattatatttttctcacaggtttaagataggataattatatcactgtatttttagagcaattaatgttagttaataccttgacgtgctttctctttagctacacatttattaatatagctcagacggttttgagcagaacgctgatacatatcgcgatactcattagcttttggagaaccagcctctgctgcctgataagcttccgcgcgcatgatgtttatctgcatattgatgtatgacatgcagacctgtgaaatctggttaacagtatccaggtcattttggcgcttggtttctgcttccagtttagcaatgatttcgtcatgcttcgcagcttgttcgcgtttgtactcaatttcacgttgagcatatttcgcgcagttatttccacattgattgttgtcacgtttgtagataagtccagtaccacctttgaaatcaaaggaaccattatgcacctgacggtctgcagcaattcttgctttaccaatctcactggcattaactacatcaccctggtaagcacaaccggatagcagcataacagctgcgatagctaactttttcattttattttcctcaattaaaacattcataacgggcttggagtcccaaaaatacccaacccaaaattaaagttggaatcatatgcggagtcattattgcccaatagattgacatactaaaaaatgcaatcagtacaataattgtaattatcttcatttggtttccttgatgataattaactgtgcgtttgatttacgttcagcaacgagtgcccaaataaacgcaataaaccacccaaccattgtccaacctaacagaaggttaacaaagaagattccgcaattacttttggttccacgcagtagcgcgataatccacggtagaaaataggtcagtgcagccaagaagaaagaaccagcaccaagaacaacagtacccgcaattaatgtttccattttaatatccttaagttaatcatcagtaattgatggagtaatcatacggcaatcctttgccattgtaaacacttaaaaatcaaacatatcaaaaagagatgcttttttctcgtaatcaaccttagctgcttcagagaaccctgtcaatggcttaacaaaagtcttctggaacagtgtgttgtagtccatccactgcaagacttggtcacgaatttcaatcgggagttcaatccctgatggccatgcaatcacggtttcgccaaacgggttaccaactttaagaggaagtacatacaccttttccccttccatgatttgtggaacagtcttcatacctttagttgcacgcatgtaagcgagcacgcctttgatatgagctgggcacttaaatccagggaaaccaccctcattatatttctggatgttgttaactgatgatacacctgcgatggtcatgtagttaagctcattaaattccttgttgaattccttgaagtatgtctgcagagattcttcaccttcttgcagcatacggcggatacattctttcagagctttctgacatgcttttggtgtactcgacttttgagtttccaggcccatgattttcagtttcggaacagcgtatcgtgtgccttccatatcgtacacgttcagagcataacgcttcttcgccgtccagaatccaccaacacctttagaaccaagtggaggacatgcaatcgcttcacggtccataaacataaggtgctgtttgttgttcatgtattcagccagctcacggaaagctttatcgattgccggttccagacggtctttcgcgaacttgtccatgaagtcaaccaggtggtttgtatcgcggaatttagattcgccaccaacctttttaatcaggttatcgcactggatataaatggagtcagtatcgccatagaatacatatgtttcaccacttgtaccacaaacactatcaaaatattcgttaactttacgctcaatccactgcaatgcaagttgtccgaaagatgtaatcgcggttgcatttcgcaggtcaaagtaacggaaccagatattacccagagcgccataacaactgttgataagcagtttacggttaatctgtgcggtcatgcctgcgacttcttccatctgcgctttgtacaacataccattcagaactgtttgattcagaccgtgcaaggttgttttcatattgtcatcgaagtcataacgataatcaacttcaggctcggttgtaccagttcctggattacgcagggcttccttaatcagttcaccattacgttgagccgcaagcatataacctttgtgctctttacgctgattaaacaccttggtgacttctgttggaataatacccgcaacatctttaaaatacatcataccgtttggagcacaactaaatgtatcagatggacggtcagcagttcctgcaatgtattcatacatcggcgctggtgcaaatgacccggcaatcgtttctggactgatgttaatctgtcggatgatgctcggatacagagatgttaagtcacagctcataacgtatttgtatgcgttcggaataggttccttaacaaatgcacctgggaacgattgacgaacatgcgatttggtttccggaatgactttgttttgagtcttcaggctgttaaagataatcgcatcccaagttttgattgggctgaatacagactgaatctgcatttttgcgtaataacccattgactggctaaggttaataaactggcgcttacggtcaatctgtacaacacgataaacatcgatgatgttataagaaatataccgttggtgatttgattcacgcagtttagaaatcggaccatcatatgggagtttaccaacacccagctcagattccgcaacataatccaacgaataagatggctggtttgtgaagctgaactttttatacaggtccagataatccagaacagagatacccagaatctgaatgatttcttgttcttcaccgaatccgttgttaatgaccttaacttttgtacgacgatgtggactcagacgttttgctgtagcttcaccaaacacatttttaaggcggttgtagatatatggaatatcaaacttctcgatgttccaaccagttaacataaccggagttttctcgttccagaataccaaatactgctggagcatttcttcttctgaatcgaaagccatataaacaattttttccaggatttcttcagggacttcatcgccgccatcttcttgcagcttagcagcaatatcgatagaccattgctccacagtggcgtatggtgagctcaaaaggtcaaagacatagaatttatcgtctaccgaatcatagtgcgtcagggcatcaatagggtgacgtgcttcagacggctcagggaacccatcaggagatgtcacctcgatatcgaagttagccacacggattttacttgaatcgtatttgatttcgtgcgggtaacggtcggacaagtatgcgagtttaaagtcatccatacccatagcttcgagacccatgtcattcattcgcttcatccactgggatgcatcacgcatggagtcgaattcttttttcacacaacctttattatagatgtctgtatactttgcagcctggtcttcgcgggcatgcataaacaagcatggagcataagggatttcacgaacacgttcatgaccgttcttgtcaatgtatcgttcgagtagattgtcaccgatttgttcgatagttaaataaaattcttgcatttggtttcctttatagtcgagtgattgacttttgttttatgacttgatgttattatactacaaaaggaccgaagtccctttgctttaaatttctattgtacgccgttcgatggttggattacccttttcatctttagttctaaccatagcctggaaggctctctgtccaggatgcaataatttattgagttccttttgaaattctatttgaagttcttcggaaaggtcaaaaatagtttgagttggggaaagtccatatatttctttaaggcgttcgcatgtttcaatttcatgcttcatatcaattaccaattgtatatttggctacgagcttccagtcgtctttttgtttaaaggagataacacggaagttgtttgttactgcgaacaattcattatgctcttcttctttgatagtgattaagccccagtcttcgagcagttgagcaatggaatcacggcgctgatagtcttcaccatcaatatctacctggcgaccatccatacgcagcatttctttgaagtgaacaatatagtaacgaccttgcttctggaggatgtggcagctctggtacagcacacggtctttattatttgcgatgcccatacgggtcagagtttctttaactttcaggaagtcttcaggttgctttaatgtaatttcaatcattttaccattccaatatttgttttttaatttctttttgttctttcacattactggtaacggtctttaagaattcatccgttaccagaccttttgtctttttcaaaacatctttaagactacctttgactttcaatgtttccatatacatcaaagcatcatctgcattaattgtataatatttcattaaaagctttaacacaagctggacgttgaccgcatccggctcagcctttgcccatttgccataacgcttgccttgtggaactgcatgcagcaaataattataatgctgttggtctgttaacccggaaccgattaagttcatcacatttacctgcatgatacaatcgacatgttggctcaatgcgttttccaaccagaatttattgtagttttccgattgaatcaggtttcgtggttttttactaacggttatatcattaagaatcgcgaacaattcattttctgctttctctttgtatgaatcggacaattcctgaattttgttaaagtcgcgtgatttccacgcaacctcatgttcgtttaattgaacgtcatcatcaaagagacttacagccatttcatttccccagccagttgagcaaacagataagtcaagtgaacttcggtattagctgcaatgccatggtactgattattctcacccacaatctcatacatacggatgatgcttgcaccagtcagtttgccgtacatttcatcagccagctttgcaatgaagtttgaataatcatttgcatgcttaggagccagaccacggagaactttaaagttacggtccttaagggcatcaatcacatcatcaattggcgtgcgattgtttgtcacgatactcagaataccggaatcgataacaccctttgcagagtaacggtcaagctcattaattgtcttacgcaggtccgggaagttatgcttaaccagagcagcaacaactttcaggtcttcgatttcaacgccttcgtttttacatatcgcgactgcacgatgaatcatctctttcatcatagtggtctggtcagctggagttgcttcaccaaacttaattacgcgacaacgagactgcaacggagtgatgatgccatcgatattgttcgcggtcataatgattgaacagttgctcgaataagcttccataaagctacgaaggtgtcgttgtgattcagccagccccgcgcggtcaaactcatcgataacgattaccttgcggcggccttcgattgatttagatgatgcaaagcgagtcaattcattacgcacaaagtcaattcggcaatcggagccgttaacaaacagcatatcggaattcgtatctgcgcacatagcttttgcaactgtcgtcttaccagtaccaggggaactactgaccagaatcaagttaggaatcaaaccttttttaacaatcgcctctaatgtttctttatcatgagccgggagaatacactctgataatgtgcctgggcggtatttttgttcccacatgaattctttgtcattaaccgttaacatatattttcctcatattagtttctactttgtactccatggggccgaagccccatttattaatcttggaattcgtggctagagccttgttccattgcaatcacatagcttgcttgtgtgccttcaaacttcgtagcaaatttatcatctttcgcccaaagcataacacggtaatcagccggaatcattttcatgttcagtttgttaatgataaatttaaacgctgcatcgccttcgtagtcgccacataccagggaatacaatggacgcgctaactctttatcttcgagctgattataaccatggataacaatcttaccgtctttgttggtgattgcaaaagtatccagagacaaaccaccagccacacgcagaagctgctgcaggtcactgcctttcaggtcgaaaataaccttagctactgggaaaggaatcttcttagcagggaacacgatagtgctcgggtctgctgcaggccagtgaatcgttgaacgttggtctttgataatgatgtttgatgcgtcttcagccagagatacttcagcttggtcagttaccaggcccaggatacttaagaagccgttcaagtcataaattgcagcttcaaagtcaattgtatcattgatttcggcttcgccgtatgacgctccagttacggaacgagtcaggatggtattacctggcttaagcataatgccagagtaaatggaagtgaagtttttcagaactgcgatagtgtctttagagaatttcatttaattaccttttattcaaatcaaaattaattaagcaacaactgccatttgtttgcggatagcttccggaagagattcaatatactctggaagttgcgcagcaataatagaaccagcttgcaccagatggtcgtccgagttaacacaataatcatcttcaagacgttcggaaccatcacggtcgataaccagtttagcaccagcagccagtgaatcgttgtagtgattacgcatcagttcaatccacttatcagatacatcagtatcaatcacaccgtacagcatgaatttaatttcttgcggcagagactgcagacgggtagcagatgcttcatcacaggccagaacccaggatttgcgcacacggttttggttatgcgggttagcgtcagtgcggatggttttaacttggatatctttagcagttacgttgttcataatattctctctattcattatcaattaatcaaagtattcatatgcgaaccaggcattgtgtctgttcgcgattattttaacatattcttcaccgaaagcgttttgcaagtcacgttcagtgacaaggtgttcatctttcgaaaaggtattaactaacacataccgtttaatttcagggacagccagtaaatgctgcccggttaagaagtcagccataatagcctctattataacatccttgtttaaagcattattccataacggtgaatcgaccaacttttttcatctggagatgttgcccgtatgcttccgggtcatggtctcggtgactgataataaaaatgttggtgtcttccaatttgttcaggatggtagcaattgctttaacaccctctacatcagtggccgagtcaaaaacttcatccagaatcaatgtgttaatattaacaccagatactttcgcagcaatatcgcgccatgtaaacagcaatgcaatatctatacgagctttttcaccctggctaaatgatgcatagctaaagtcttcacgtccacgagatttaatcgtttcgttgaactcttcatctaacgtaaagctataatcagcttccataactttaagataagcgtttatctgcttattaaagatgggaatatatttcttaataatcgcgcccttgataccagaatctttcaacatatccgttaggataccacgttgatatttttccatcacaaggtcagatttctgtttaactattttatcaagctggtcttgaagcattttaatgtctgctgcatggtcaataaattctgacttagcttgctcgattaatgctttaacctttttagccttttcgacagtctggactaaggtttgtttcttagtttgaatgtcttgagctattgtacgctggttttgtcttgccttggtatacgcatcaaattgctcctgaacagcattctggcgagctttatgcttatcagctgatgcattacattcttcaatctttgcctcaatcctggcgacaatggggtctcctgggtgcaactgactggcacaggtctgacaacaaccacctttctcgtacagaccaacaacctttcgataatcgtcaatcttcgatttaatcaggaatgattcctgctttaacttcgtgagttcatgctcagggtcttctcccaagattatctcggtcagtctggtcgttgcttcttcgatagtcgttttgattccacgtgcttctgtagcaagttcatcatacatcgtttgcagtcgcaacagattatcacctgataattttcgttgacggtcttcgttgtcctgatagattttaatctgttgaacgataccgtcatgctgtacatccatcacctggatttggctattgacttcacggataagagatttgttcagcttatccatatcggccagtacagaaacctctaaaaggtcttcgacaagctttcttctggcaggagtggataggcccataaaaggggtatatccagctgtgccgagtacgacaatttgtttgaaactggcgtatgacattccgataagctgttcaaattccgcttggaagtctttactgctggcagattcatcaagacgtttaccgccacaagagatttcaaaaacattgggtttttgcccgcgtttgatatagtattcttttccatcatattccatccacaattcaacgagcatatcttttttgttgctcgagttaatcagctggcctttctttacatcacggaaaggcttaccgaacatagcaaaggtaaccgcttcaaggaacgtagatttacctgcgccattcttgccagttacaagagttttctggactttatccagttcaacagtaatcggttgagcaccaaccgacataatatttttatagataactttcttaagcttaaacgttttcatgtattgttctcacgaattgtttgttcagcatattctagcatttcttcggaagaagcaaacacgtcgtcaagttccatggcccatgaaacaccttcagaatattcagaagtgacatacatagttccggtataccaagaaccatccacgtcccattctacattaccgaaccagccatcgccaatatgaaaatcatgtttatacattttcatcattataagcatccttgatgcatgattcagccatatgaattaatgtttctggagtatcatctaccattacattaaagctaaattccacagcccaatcggtgactacatagactttgataagttgaccggtttcccggtcagtgatagcttcaaaccaatacttaatagtattcggttgattatcgtcgtcaacaacatcacattcgcggatatgctcaagtcccgcttcattaaaatcataaagtctcatggttgtacctcaagatataatttgttggccaatgctttaagagcttttgattctttctcattggtgtcaggtaatgcatcaatatattctgccatcatatcagttaagcgttttatgtctaactcttcttcggagtcagtcgtatcaacactgttatcaaccttattgacaacacgcaattcatgtacacgcttttctaattcagattcgaacttggtcaggtctttatcgactttttctacaataacacggactgataggtctttgaagtcgtcgtagttaatagtttcgtttggataaaaaatcttccgatgccaggtggtttcattcggaataaatttcatctcttcggtttctgtatcaaattcccagaatccgcgcgggtcattctcatcacctgctgttaatgtccatggcgttcctatgtacttaacgttcgcagcttctgaaatggtatggaagtgcccagaccaaacttgcttgtacttcttaaggaaatcaggctcaagcccgtgggatttcaatcctttatagaaataaaacccggttaattcccagtgaccgatgcaatattcggcaccagaagttttgatgtgttgatgaatgtcagtcgcgttctcgtcacacatccatggaatcatatcaatctgacaaccgtcaaaatcaacagtcgttggcttgtcgtagattttaacatggtcatacttattcaggagttcggtgatagcattaggatgaatcttattcttcagattcatgtcatggttcccgactatcgtgtgcatagtaattcctgcttcacgaaggagttccataatctcgcggctgaattccattgtcttatgcgttacggccttacggacgtcaaaaatatcaccatattgaatccaaactttaattccattcgctttggaatatgcaatcgcctgtaaaataccatcacgttgaatgttttgagcccatgggtcgtcagctttgacacccaagtgccaatcacctaaatttaaaattttcataagccaagcgccgttatcgcagtgcaaaataaaattattgaaatgaacccgtcaggagtagaaaagaatcctatccaacaagctcgtgtgaatgtgtagaatgccatgaataacacaacatatcctaaaaataattccatataatctcctcagttggttcattttatcatcccgaatataaagcaaaaaaggaagcactaggcttcctttccaattaatacaccatacagaggttcatgagaagacctgaacttgataggcttataggtaatagtaccttcattttctgctttaatacgagcggcttcaaattgaagtatcatctcatttttatcagatttaatcttatcaaaatccgtcgaattcgtcattcatatgacctcttaaaaatcaggatgttcgtcttgaaatatattacccaatcgttttaattcgtcggaagtaagaatatctacatcatcaatagtcataatacacctcttaaactttttcgtattcgtcattcattaaccagcagtccatgttatcatcgttgccaccacttcttaagttgatgtgaatccacccaaaccttggctacaggctcaatccgaaaaatttcatcggaatactgcccaaccattttatattcggtttcagtctgcttgatacagatattaccatatgagcgaagtctgaaagcggctccgacaagaagccgcttaaaaggtttatttactaatgccatttacgatttcccaaatttgtttgcgagtagtttcccacatcaacttaatcaggtcttccgtaactggttggcggtaaattccacgcagtttaactaaagcatatttgtatgcttcaaaattgttttccagcactgccccttgagcatgcttattcagtcgtgcaatttcacgagcattctttttcagaatctttgccgcttgactctgtgcttcgagtgcgttcgcttcttcgagacgttcctgtgcttcttcaatctgcttatcggtcagttgagaaatatctggagcttgcatattaatccttgggagttaactcaattgtaaaatatagattagcattatccacatgataacggtaatcaacgttattatccggcgaagtaaattccagattccggacgtttaaagggtcgatatcaattggaagaccttttatgtctcgcagataaagtttaatgaaatatgggagcgcagtaaagtcttcctcgattttatctaaaaaatcggtaatatcaaattgatgttccatataaaaaatccaaatcaccttctttatctttggcgctcttatcagaccctggcgctttaactaaagaggattcgtactgtgtcattttgtcatagatgtcctggataaatgtttcatcagccagagccaccatatcgtcgtcacgtgaatcatacacgttatgaacgaagtagctatatttctttgccatttctttacgttcttttttgatacgctgaacgaaagcattgaagcaagccattgttatgtaagcatgtggattatcgtattttgtttcgtcgaagttatgaagaccttttattgcggcctcaattccgtctgcaatcatttcttgcttccaggattgggtatatccggagaagttgaaacgtttgctaagaccttcggctataagcataattgccagaccaataacatcgttctggcgaataattttattcgggtcggtgttcgcattcagcttctgtttccactccgaaatagctttcagaagctctttattatttacatagttattcttggttaatttaatttcgttcatatcgcctcgcttagtatatgaatattatatcatccttaatacaaagcattagcgaagtaaacagtaagcctgaaagaccttctccataattgccttaaattcatgaatgtcaatataaggaataacctcggcatcactaatgaattccatcaaacggtcatgctcgttgtggtattgtccttcattcagcatactgatatgggactcccaagagccatacccttctgcgtgcggaaagaatgttattttcatgaattcatccacccaaaacgttcccaggccctggacggatatcattgtatgattgatgtgcatcagtacaccatctgagcagcttctaaaacatcgtcaagcttatcaaactggtcaacataatcaatcccacctacttcatctttggcatacaaccaatactgatggaattcatattcaataataaagtggtcaccttcaatctggaggacaccaacatcattaaattgaactgcataacccgccagacgtacatcattcaggagttcttctttcatagtaatcatttccaggtttttctcataatgagagagtttaattttaatcatttaagtagtccaggaattcgtctaatgtcatgccttccgcccaagctattttagggtcaagcattttcatataagtggtcttagagcttataggaagtatcctgaaatcataatgacttccacgtagcctcttagcctcttttataatagtttcactattaaccatcatagatgtacgttggaaaccagataaagctttaaggacgattatggctgatacaccttctggtaaattattcatttcgcacccttaacaattttcaggtcaacaaaacctttcttgcgctgggacttcatacgcttgatagctttatcagaaacttctttgttttcgcgcagaagcggcagaccaaacgctactacatcaaattcattcaggatatactggacaaggctttcacgaatacgcgctttacccattgtctgaccttctgcaataatcagtttctgtacatcgccttcccactggtccagaatctcaggggtaacaaaaccagatttcatcagagtgttaactttagcaaatgcgaaattagcgatgatgttagtgatagatgcagtcatgatatattcctcagtctcattaaattaaaattttattatcctggggccattataccatgaccccgttggtttttattgcgctttagccgctttccagccttcatacatcattgcggctgatattaatatcgctcctgagcaacttgaatatttgtgattccaaaaccagttcagaaaaacttcgtcatcaatgccttgagctatcatattttcaaagaactggcgacgagattcagcaattcgttgcgataatttagattcaggattcatttaaattttccagttaccgttttcatcaataaattcaatccagtcatttactgaccacttagttgtatcgccttttggagcagaatttaaagcgtataatccttgtttaaaaagcattcgtttgatattcatgttttcctcagctgtaacgatagcactcgtttgatttacgttttgcaacaagatgagaagtattataatccaaatcatcctcaacgtatacatcttttttcaactgacgaacttctttacgcagttgacgattcatctcattcttgacttctgaatcaacgccacgcatacgcttccatttgtctgaacgaaagatattttcttcaacttgttcctgacttacaccatcaggcgcctgacgacgccctgaataataaaaatcttttacagacaattctttacgacggatagttttacccatagttacctcaacagtttgtatccaataagatttttaatgtactggatatctttgacatccaaatccaacttaaggtctttcagacggtcgcacagggtcaaaaaggttacatgcttccaattcttcactgggcagcaataagtcttaggaccatttgcaatttcaatattcttatcagtgacggtgagaaaaattaggcgctcatcatccagattaagggtaatgatatttttcattgagtgtaatttcagactcataatttaatttccttagctatcgaacaaaacactccacggtcacaaatcattttaataccaaggtcaattatggtataccacacatccaggctagatatttcagttactaaaacagctttgccgttgattgaataatactggttgactttaatttctttatcttcaataaccattttgttttcctcatcagtagttgatgggataatgatacaccgttcaaaggggcttgtacaccccttttttaatcttcaattaagtcctggtcgtaccccagggatatcagttttgttttaaaggcaggaatatttgtcattttttcatcattgacaaaaatcactgggtaacgaatgttaagggtaggatatccagcacgcttagccaaagacacgattaaaggcctgtcataagcgatttcagagccttgtttgttaaggactgaatagaatgtataaggaaggtttaaggagcccagaaggctcctgacgtgcatacaaccagggcatcgaccgacttcttcggggataccatagatttcaatcttagtcgagttttggcccacaggaaatcactccttggtagttccaggttttaataacttcttcatcgctggcggttgcatacgggacataaatctgaataaggaaacctgtgtcatcgaaagagaaataaaccgtcggtttgattccatgaatctcagatagagcatagatatctttaaggtcttcttctttatcagcaaagaatttcgggtccaggtcacagtcgtggaagtaccattcatcaccgaacttgtcccacgcggtccaattagtagctacatattcttcaaaacgtttcattctttcaccttcatcattttagcaataacactatgcacagcctggattcgtttgtcgaactcagacccttcgaggcccttttcagtactcagggcaccaatcatcacaaacagcaatccaaatgggataaccaggattaaaaggcacacaataaacaggacaaatgtaatattggccaggatatcagaaacagcattacgaaatttattcatatttacccttaattgattaaccaagcattgataagcactaaactatactgcgaataaaattctggaccaaaatgaaaaatcatatcatttatagtatccataatataattaaatttaatcatgtttccacaccccattggtatttgaccaaagtcgctgattatctgaccctcgccacagttttttggtcggaagatttttctcatacttcccatcaataataacatcaacatatttaagcatttctagttgtttaatatcttcaaacttatatcctgtccacatccaaatgcttttatttggataaagatttttaacagtttgaaccacagagtgaataacatctcggttatcaggatagagagggtctcctccagttatagttaatccttctatataatcattattcaaacattcaattaattgttctagtgtttcaccagtgaatggaataccatttctagcgttccatgttgatttattataacacccttcacatttatgcaaacaacctgtaacgaaaagaacgaccctgcaaccagggccattaataaaatcacaaggataaattctatcataattcattggtgtttaaccctatgcatgatttctttatttttgccgagattaaatccgcgttcgttcggatttcccaaataaccgcaagttcttcttattgtgttcatctttttagggtcagtttctccacaaatagaacaaacaaatccgttttcagtaggagtcatttcatgggtacttccacacgtaaaacatttatctactggcatgttaacaccaaaataatctaaatgttgcgcggcataatcccatacagcctcaagaccttttaggttatttttcatatcaggaagttcaacataagaaatgtgaccacctgtcgcaatgaaatgatatggtgcttcacgagaaatcttttcaaacggagtgatattttcttctactgaaacatggaaactgttagtgtaccatcctttatcggtaacatcttttacacttccatatttttcagtatcaagtttacagaagcgataacaaaggttttcagcaggagtagaatacaagctaaaagcaaaaccggttctttcagtccactgcttaagacgagcattcattttagtcaaaatttcttgtccaatatcacgaccgacaagaatattcaattcgtgaataccaatgtatcccaaagacactgaacttctaccgtttttaaataactcaattatatcatcatcgggtttaagacgaaccccgaatgcaccttcttggtaaagaataggagcaacagtcgctttaactccttttaaggaattaattctacacatcaaagcttcaaaacacaaatccattcgctcattgaacaattcgataaatttctgttcattgaactgtgttccaatataagaatctaacgcaatgcgaggaagattcagtgttacaacgccaagattattacgtccatcaagaatttcattgccagtcgaatctttccataagctcaagaaactacggcaacccattggagaaacaggaatagatgaaccggtgatagctttgttattcttaactgaaataatatcaggatacatccttttgcttgcacactctagagcaagctgcttaatatcatagttcgggtcgtctttataaagattaacaccttcttcaacgaacataacaagtttagggaaaataggagttatcccatcgcgaccaaggcctttaatacgatttttcagaattgctttctgaatcattcgttcagtccagtcagttcccgtgccaaacgtaattgtcacaaaaggcgtttgcccatttgaactaaagagcgtatttacttcatattcataagcttggaatgcatcgtatacgtctttttctgttttagattgggcataattcaatgcatcagtgatttgccatttttctgcatcttcaatatgttttgcgtatgtacgtttaacataaggagaaaatactttgtctacattagcaaaagtcgttccgccatattggtgagaagcaacctgtgcagtaatttgtgccataattgcagtagcaacaccgattgatttaggagtttcaatctgtgcattaccaagcttaaatccgttctcaagcattccttttaaatctactaaacagcaattagtaaatggaagagcaggggaataatcaatatcatggaaatgaataattccactttcatgtgctttcataataaaagacgcgaccatatttttggcaatgtgtttagatacaataccagccataaggtcccgttgagttggaaaaacacgagaatctttattagcattctcgtttaaaaggtctttattagttttatgaatcaatccttcaatttcgttttcaattgtcattttaaactctttctaagctgcttcttaaatgaagccattaattgtgttttggtgtcagattcattataagtcataccattcaaaagcatttcccgaatcatttcttctttccccagacgaccgaactctttggctttgtctgttacaaaattggggtgaatattgttttcggtataatcagatttcagatagacaagcaaactctctaaccattccaggtagtcaacatcgcgactttttagacctgaacggctgaacttatgcttcatttgtccttctgttccattgcacagattgcatagtaacccgcgaaccttaccagcttttggcccgttcaattcgtggtcatggtcaagatggttggcctgaacatcggtgtccaaatcacggtggcaaattggacacttaccagcttgtgcatcataaagtttttgtttttcttctttgtataatttgccagtcaacaacataataaacccttaccattattagataagggtatttattaaatcttataaaacgcgcggtgtaaccgtttaaattgacgaatcatctttttagtaggacgagtatacaatcccacacaggtggccataaactggtcagtagggcttcctttgataagaagtttccagaccttgtcaccgtttaacttttcggtatagactaatgcagttttcattaaacaatcctaaaacaaggataatggcattcaacgttaccattatcaattatcatatactcagtgatacaggtccatgacccttcaatttctatggtatcaaaaaggtattcatctgtttcaacaacgtcccaaacattacattcaacgtcagggtcaaaacgttgtcttaacgcatggataacatcaccatttttaaatcctgcgtcttgaagctctttcataaaacctgattgagcagccgcatgaatattaacaatttctaaaaacattaaaaggcctcatcagcaaagcgaagttgagcttcaagccaatggatataatccgccgcggcaaaaattaaagcagattcttcatcaggtaacttacgggaatccgacagttcataaagtgatttttcaatcaggcggcctttatgacggccaatttcaattttggtactcatatccaaactccatatcgattaaatcattgtttgaaggttcattataatctatttcggaatcgttgtaaacaggttcctctggctcgacagtttcccatcgagcggtgtaccatggttttatagcgtaatccattctctgatagtttgggttacgacacgttcttggagcttaaccagttcaacagtcgggaccatatggtcccagtcggtatgataagaaccggtacgagtttcgtttacagccacatgcacattatgttttttgctgaaataaattgcctggcgatattggtatttgccggtttgtgtccattcgcctaattcaaccggaaccaggtagtccgaaaattcaaactcgtatgattcagtaaacgcatcatggtcttcaatgatttcgcttaaaacagcatcaacatctaattcattttcaatagtcattggtcactccaatagcttgatacttcaaaatcaggctcgccgtcgtcccagtaccagggacccaccggatgccaatcgccatgcttatcttcttcatattctatagattcaagcccaacgtattgccattggacttcataagcagtgccaccaattacaacagtgttctcgccatacgggttagccacagcaaagtcaataccttcttcctttgccagggcgaccatgtattcgtatagtttatattccaggtcgtcttcgttgccatcgcccagataaattgtttgtccttctaattcaatcataattccaccataaattcaaataactggtcgcgtacacaagtatcagtccaaccccattcgttggcttcttcttttaaccaatccgggagatttgccaatacggtttctttactaggcgcaggagtatcaaactctcttgcaaactctcttgcgcaggttttataggccatatcaaattcggtcatttaaagttccagaatgaagcaccaaccagaaataaaggccaacaaatcatagacgtcagccaccaacaaaagtcacctgcaccgaaatcatctaatttagctagggtcttagcataaccaataccgatgataagatacaaaatacccaacaataattcaatcatttaaaatattctcgcagttcagtgaatccgccaatatgacttccgtcaggagcaaatacttgcggcatggtcaaaccaatttgagattcgcgaccaagtgcagccaggagttgggcaatcttctcatcatcaaacacacctttttctggcataacgttgatgaactcgtaaggttgttttttaacatccaaaaaacgttttgcattatcgcagaatacacagcgatgaatagatgaatcataaccatatactttaaacatattattccttaattcctaatacttgtttgaaggtctcagtataatcggggtattgaccggtttgttctttatgtttgaccataataccataaacttctgaacgcatattattatatgaacgagttaaagcagatttcaatactgaataactatccggaagtttaccgtgttctttataataggccagagttaattcacggaccgccttatcagcagcctcaagatattctttacgctttgccattttcgtctcgctcaaatttgtgtttacaatgtctgcatttgtaacgaagagtactagtctgccaatggactaactggacctgttcagttccgcattctggacagtttggaacacgtttagaagcacgttcacgccgacgaaccatagccattaccatatcccaatcaggaacctgactataatcaccacagccatgaatctttcctaactgcacaaggtcagcaccctcagcgttttcaataaattttaaaagacctttattaacccccgctgcgggggtccattctggaaatgcagtttctgcaatatcttcagctaaacgttgtttcatttaagcagctccagagcttgttccagtttatccagacgattagttgattcttcccaaagtcgcttggctttggtatagtcttcagttgcctttttattaacagcaagagctttattatacgccatttccagagcaacaatttcaggcgctttttgttccactggctcattattcagattatcaatcaggtcttcaagggtggtttcttgcggagcattcataatttcctcacttttctttttataaatttctgcaacagttggttgttttgcacatttaacttcacgcaatgtcgccacaattttccaacctttccaaccatgagtactggtgatagggtctactttaattttttcaacagtgcgcatatagttaagggcacactgcagctgtgaagtaagcgtgctcgcggcatcaagatactttttgacattttctggagtagctaccggcgtaaagaattcatacttaactgtaataattacctggttttcaccagactctttaacctttatcatgtgctcagccaaatgggagatagtgcgataatcgctacccatcaattttgtcgctgatttgatgatagacattttgttatctctgaattcacgagcccagcaatttgcgaattcagaaacagtatagccttgtttatcaaggtagtatttttcaacatcaccaaaccaatgatatccaattgtacctttaccatgtctggattcaacgccaaacttattaagaaggtctttattaactaggtatgccaggactcgggaacctttaaaagttttcttgatatcatctttacccgcacgactcgcaatagtcgcgatgtctttcttgaagcgaccagatgcaacaatcgtcgagtcaatctgatttaaccagtaattgataattaaaaggatagccgattcacctattaatggttttacttttgtatcaatagtggtgttaaaggcctggatatattcgttgcgcgtcatagtgttctcctcataaagtaggaattcattatactccctccatccttggaagtaaacattattttaatgctaaaatcgccgcctgcaatttattgcgttgtgtttccatattcttgatgcgattcataacatcctgaatactctttttctcatcttcaatcagaccgtttaagcggttgactgattcctggatagcatcagcatgatagctctcaataggcttcattggtgggttaaagatttcaagagagctgtttggctggattttccattgatacatatttttaacttccagtggtgaaattttagcctggtcgtaagatttaaactgacctgtaactgctgggttatatgtcgcagtagggatatgttctgccatttctggttcctttttctcttgataaggtgcataagacaaaagatattctttagttaatttaatatcaatgactatagttttaaggaatttttccgtttggtggatataatttgtatcttcttcaaacgtgtatgcttcaacagcatggcgcatataaaacagcgcgatacccataacctctttaaaggtatcacaaagagcaacgtcgcccttggtggttggtttgaacttaatctgtataccatcattcttgatattgataatcaagttactggagttaaaattatagttcttgatgttaaccggagccttgcgaatacgaagcccgccagccaggatttccttaatgctcttacgaactgtggcaccaaacaaaaacgcagggcggcgacagtaatcattcagagagttaattcttacaatacgttgtccatacccctgggtggcagaacctgatttgattttaccaaagttaaccagagaattcatcgcgataagacgggttgcacgaccttcacgctgttcaaatcgagaatattctttacgtgttttaatgttcatatcataatccaaataattttttatagagtttagcaaaaggccaggccacacacattataacagcgactacccagaatataggccagcaaaatgttgtgaacaccgcatcatactcgtccccactttcgtagggactatcaaacttgtggagcaacagggtagtaataaaacctatcacaagataaccaaaaataatgctgataatcaaaatagtcatattaatccttaagcaattcaataacgttcatcagtttctgacgttcggctttcgccgcgttattcagtcccgacagacggaaaatttcatcatcttgctgctggatggtgatgttaagctcttcaatctgtttagtgaaaagctcaatttgctctgaatatttttcattgcttcgcactggaacaggttccattttaggagcttgttctgaagggctgacttcaaattggtctttaatttggcataatttaatacgctggacgcctccagttttaacatcataaaaggtaagaataccgtgacattccagtacagacaatgccaaacgaagatggaatttccaattatcatattgacatccactaaaagaagaaatactgtattcaccttctttttgacctttaataacattaaatagtttataatctaaagaattattggttttaaaggtcatttgtttatcttgaccgcttgctaaacgagcgcctaatgccaataaacggcgctggtttttccaaaggtctttaaccacttcatcaaacgtcatggtgttaatcgcacgaccataaaggtcataacctttattataatttttaagtaaaattttggcattagcacgagacaacatacctgaacgatgaagagatttcatgactcggtcttctaatgtaagaagaccagtggtcttttcaaagattttagtgaattcagcggaattagtacaaacattgaacttattccacatcatatatagaacatttaaaaccacatctttggtgcttggtatacgaccaaatttaacaacttttttaacttcagaacgaatttcattaattgcttgcgacataataatttcctcaatagattaatcaaaggtcagaaccattataccatccttggtataaagcgtttatgcgagaaccgtctttaaacgctcttcaaacttccgaaggagtacctggcgctctgctctttgtttggtataggtttcaatacgctctgaagtgagattgtattgttcattaactgattccctcatgaattcaggaatctctttacatgctttgatttcattgaacttatcaagcaccgcttgttgttcagcaatcagaccatcataatattggatatctgatttgatgttttgtacatcagattcagtaggcatatttttcttcgctcttgtcgcctgatactctgcattagtctctcttgaccagaacaaagagcggtttttgttggtgtttttatacacatcaacaatacctactgaatcaacagtcacaatccagttccaggcgtttttataagtttgaccacctgatactgtaatctcacccgcacaagcaacatcattaaagaacttgctttgtgcttctgatttaaaattaccattattgtaattaatcagattaaagattgatttagcttccattttattctccagtatttggtaactcagtatgggaacattatacgtctatccccataccatgtacacatttaattaaaagttctttcagtcttttcaccactgaaccagacgctcttaacggcttgctgggcgcgatgaagctgctctgccatataaacaccaagggcctcagctttacgtgccctgtgagcttctgcggcgactatttgcaacttatccatcatgataagagctttacatttctccttcagagcatatcgcttcttctcttctggggttttgaccattcctcttaacttgtgcattttcaacttaaaatggtcagcagatttcagacatgcctcaatcatgccaagttcatactttttcataattcctcacttgcgacgacgttttggtaatggtttagggaagaacattgctttacctgcaggggtcaaagtcacgcgcaaagcattaccaataccaagggatgctttaaccagacctttggcttttaactcaccaaatgcttgacgttgttcagggtcacgagtgttaaccatcagacctttttcaccagcagctttgattaattctaacattttattctccgtttgtttatttggtaactcagtatggaatcattatgcatcatgaccatctggttgtacacatatactaaataaaaatacttaataaaaccataaaggagaaagtttatgattttatccggaagaactgttgatgaactcaatgaaaaagtccaggctgccttggctaataattggtatttgtttggttctactatggtgttgccgaatacccctacagatagcaaagagcgttttttccaaactatgtccagctcggaaactcagataccgggcccgcctgggccaaaaggagacccgggtgtaccaggaccaaaaggagacccaggcggggatggaaagtcttcttatcagatatggcttgacttgggaaatacaggaactgttgatgattttttaactgatacagcaggaaagagggaaaaatccgaggtgttttggagtggtataaacgttctattaactaatggtgtgacgtcaaacataattagtgttttaaaggggattccgccgactgcagggactctatctccgttttttagaaccactgatgataagttgtggccatataaccaagacagaagcctaatgtttaaactcaaccttattggtaattttacaggagcctcgcaagctcgaagtataacattaaatttcgttggaaccaacggaaacacttatatacagaatcgtccggaaaatgctacagatattttgtcttttacaacgttctttagcattgataaagatggggcaatggctaccaatggtacagctataactgttatgccaaatggcggcaactttacaataacatctgcattgttagtagccgaacaaacagtgacttcataaacaaaaaagggccgtatggcccttagattgcactccaaaaattatggaatcttatagtattgatagcccagttaacaaacatgcgagtttgcttgggagttggtttgcatatgtacttattgttgattcgtctgccagtttcccgacagactgcttcgagataccagcgccgacctttattaggtcttccatacgataagaagaccttgatttcctggttatcgataataggaattgtggttgtcaagatatacctcctcaacaaacttgtcccagaacttcatgtccaccttcgcaggcataccattcttagcagcctggatggccaggacttcaacttcatcaacagtattttccaacaggccttgaactactttgaaaggcatatcaccagcttttattgctttaataatagaagcatttttaagtggataaaccaggtcaccagtttgatagatttccttcagctgatatccagctcggtaagcatgactcaatgctttccagtcaataccttcattggcttcagccttacgagcacgttcaccatattcggcatcaagtttattcagagattgcttgagctcgattaaagacagggtggtttggtacttacgtccaagaacagtatagaacgtttgaggacctgttttctcatggttatgaaatacccattcacagaactcgttttcagggagccggtgcttaatatcttctactttagttcgacgttgtttaatagaaccatcttcttgataatcgacccactgttcaggaatctggttaacaattgtcagtacaccacgcagtgcagccaatcgagaacctttaacaccatatttggaagcttgcttacggacgtaccccaaataggctttcatgttagttgtatagaaccgcgaacggttgtcttgaataaacttccatacatctggtaaatcggatttgactaccaggtcagccggggtgtgaatcatatccagggcaacggtttcgccttcggcagccagtttaaagaaatatttcagactgaataattcatggtcgatatcgtcttttgtgtttttggtagccgtgttattcgtgttcaggtttgtatgattcatcgcggttccgagcaggatatctcgcggatgaggaacaaagatttctttaaaatcaacatcagattctggggtgcttgttccataaaggtggctaccgaagtagcctttcataatagttttcattctttgtcctcgaagtggattactgggcacatcttagatttacgagctttgatatattgaatgaaaacattttctttaatttcctttccttcacgtttagctttaatgcgttcccattctttttcttctttacgtaaatcgtaccaggcccataaattcattagaccatacattagaccaaatgctaccgtcagaataagagccagtgtagctagtcctaaaataaaccctaagcctaaaccgaccggggtgcttaatacaaagaaatgctctaatacacctgcacccgcgacagttaatccaaaaaccatactaccgataaaaacggcacaaacaaaacaagcccaaaccattttccagaaataagcacacaaagagtgtggacgagaatgacggtcataaaaacggtcgtggaaacgagcgtgccatgagtttgtattgataatcataataattttccttaagagttcatagttgggataacagagttcagataagagactaaaacttttagctcgtccttagtaaataccacttcactttcgccgtcatgtctttggacaatagataacaggtcacggccgttatgttgatgcacagttaattcagtattataatctagttcctcttcatcgccttcaaacgtttcactagagcgaatcagtgcatcttgtcccggaactttccattcaacttccggtttacattcttcctggaagagtttgaaaatacaatcaaagaatttatcagaatcgctaatgctcaggcattctataccattttccagattaaacccattttcatttttatagatataagcgtatagctcatcgttaatatcgacaggagcactattacgtccattgagatagtcagctctatccaaaaccattaaattataaagtggtttaatatcttggatagtcagtacgattttatcgtcttcttgacaaagctcgattgcgttattaaccacttcagcagtcagttcgccaaacaattcagttgtttcaataatcattttctgttcctcaacggttatgttttaaaatactataaagcgcttctacttggcttgcatccaggtaaataacatcatcatcttgctcaatggaaatcccaccagtattacctgcaacaaaattacattcgcatacttcaactgggcggtatacgtcaccaactggatgctcaggctccagaacaatcacaccattttcagaattgccgcttgggtcatataacattacattttcctcactaaccacgaaaagaataaaccgattaaaataggacctataatcattgttgaccaagcccagggttctaagtaataaatcatctcatgctcctgtgccaacaatttcttggttcacgtttaaaaatttcatcatgcattgattgacaaccaacacaatatatcacacctttaatcgcttgtctccgcgcttcaggaattttttcgtcgcagtcaaaacagaattcagcagactccctttcaactgcaacttgtgctcgtgcgtgaacgatagcggcttggacaaccgcttccatctctaactgttcagcaccatcttttgcaaatccaacagccattattctttcaactcattcagataagcaattaattcttctttagaactattcaaatcacgcttgcactgttctattccagaatatgaataaccttcacaatattcaacagccaggtcattggatgcattttcaatgtgccaggcgagtttgataattttttcaatctgttcagtagttaacataatatcaccagtattttttgatggtagaaattaattcttggacttgagtggtcttcagcttacacccacaaccttttaaggtgtctttaaggagccatggctccttgagctcatccttttccaggcggattctatatccgcggtaatcagcaaatatgcttccgtcatcaaatatcttaatttcaagaatatgattattggtttcatattccaatgaaaccatggtatttgtaagtttcattattccaccacatatgataatgagaaaattgctgatgaaagatgagtagcatcttcttcgcacagttcaaatggagctttctgcaagagttcaaccacttcttcatcagtggcactgtccataaagattgcataatcattaagatagataacaacctcatcaccagtattaactgcatcaatcttgatatttttaattctcattgtattctcctcagtagttgatgggataatagtacaccctttttatgaggatgtaaaccccctaaatgaaaaaaggtccacccgaaggcagaccttttgaattactctagtgttaacagatacttagtctgaaagaaaactccaacgatatcgtccagagtcgattgaatagccttaggtacaactttatagactctttccgagcttttaatcatttcatctaaaaacaaaattgtatctttcggcaagtccgaggcggacggtaatgcagctttgtattgtttcccgctgtaacctaaccattgctcactgaactggtcgagtggaccttggatttctgtgaagtagaaatcataagctttatggcgggcgtaacttttggtttcaagatgggcggatttaaaataagccaaagagactaacaaccacccaatatatgaatccacctcagacccacgacccgttacgaaatcatcaaatttcatcttccaattttaccttcattaatttagcgtattcgactgcagccgcacggccatcaatttgacatgtgatttcatttacacattgactcttattgttccattcagttttaataaaagcccaaaattgttcggactgctcgacgctgggttctttgaattgcgaatagatttgcatcgcactatctgcatactgggtaaatttaccatctgtagcagaggacatatttgggcctaaacagcccattagtaatagacttagagaaagtcctcgaataaggtccataaaggactccttattgttggtcatgattacgctttgcagccttaacatagcggaatactagttagtaactgtatttataatcttttaaatttgaaacaatacattgcaaataaatcagaaaaatgtctatcaacccatattctttgcactggactagtaacagtcagcatataatgtgatttttgtaaatttattccatttttattcgggcattctttattaacagaatggtacgtgcttgctactatttcaatttccctttcatatctctcgctatctgtttgtgtgggaataaatgcaattccagcaataacaaaaatagagatatacgtccaaaccttgtataccatgcgaacctcagcttgttaattcgagccaatgttttctgcataaagatacgtacgattcattcccaccgactaacacttgctcgccgtcctttacagcagcaccgtcgattactctcgcggtcatggttgctttccggccgcaatgacagacgccctttaattcaaccagtttatccgaaatagccagaagtctggctgaaccgggaaataattgaccccgaaaatctgttcttaacccgtaacacataacggggatattgtaattatcaaccacttgagctaactggtcaatttgctctggtaacaaaaattgagcttcatcgaccaggacacaatggatatccttttgagactcggcccatttatagaattcaaacaggttcatgtcggccgttaccaggtttgcttcctggctaataccaatacgtgatttgatttcagattccgagtccctattatcaataacaggttttagcaaaagcacactcattccacgctctttataggaataagctgcagtcagcaatgaagctgttttgcctgcattcattgctgcgtaatgataaattaaactcgccatatcaccttcttaaagcgtattcacataagctattaattcgttttctttcgcatcaaatcgattagcaaattcttcctgatggtcggcatctatcgggccatattcatcgtaaaaagcgtttgcttctgtatgctcatccaaaagctcatggataagctcaaacaatctacttttctgactaatacttaaactcatttcggttcaccatatcgcacaaatttaggatgttcgcaataaccagaatgaaaaccttcacccttatgattagaacatcctttattagaacagtaccaccagtaatcaaattcacattccatttcgtcgttgcataaagctgcgattactggccattcgcatttttcacatttggccgttttaagaattcgggcttgactcataattcaattccatccatagccaaaattctttttcgttgggtcttgagagcttcgttagcccggtcataatcttcttgactaccgctaggctgtaaagccgctacctttttggccaagtgaataagcttatccaagttttcaacaatacgttcttgttcttcattcaggctcataatccaccactattaaatcaatatcaggagtaaacatgtcgattaatttagaaaccttttcccaatctccacctgcaataccacaaccaatgcgaggaatgtaaattaccggtttaaacaaaagggtttctgcttgtagatttaattctatcatacagtttactaaagcaccataatcaagattaggacctggttcatattgagtatacaaattataacacataccaaacccagtaggtttatgtttaaaaacaatagacatatcgcctaatttatcacgagaaccatattcagtagtggttttatctatttctaaaacttttggataagccttcgccaactgtccagctacaccagaacccattgtgtggaagcagttgcaaccatgagcaataatattgccttgaagaaagagggcgacgatatcgcccttaatatactgggtaatcatttagagttcaatcctctattatatgaatccactaacctgtcaaccatactggtgcaggccgccttatattttgcacttgaaagaatgcaatccatttcaaataatttcttttcatatttgttggataatacattctttttcaaaagtgtatgttcaacatcattttggccatctttatatgccgcggtgagcttggcactgaactggattatacaatccacattgcttgctgcgcaataatctttagccgtcctcgttgcatattctatgatgctgttgttgtcgtcgctctgtactgaagctattcctcccatgctgaatactaaccctatggctaaagtgataactcttaccatttttaatccaccgtttttaataggcctcgtgattttaagtagttagctttttctaggacctgtgaagcatacgtattaccagctttcacattccatcctgcgttatatgatgatagtgttttccttatatcccccttatgaatattcaaccaatatgaaagctcaatgtaagcccagcgtgcactgttctctctcttgcttatcatcttgattatttctttatctgtcattgtccacccaacctgtttcacgcgttcgcgcacggttggaagataattttggaatataccatatgcgtgatgcttatctttatttaatccagtattaatcccagcagaactctcctgccaggttaaaccagccatgatatatcccaaaccattatgttggtgcggattttctttgtacttaccatttttctggaactgttctccaaacgcataagcatattggaggttttccatttgttcattactgaaagtaggctctacgctatgggcagacatactaactgtcaatagtaaggtggcgattacttttttcatgaattccccattagatataaatcacttttgtgctaatttttccttccagacgattagagttaacaaacgccatacgacaacacatggtcggagacttcccaggaatagcggggttaactgtcattcctaaccacaggttcttgtctgtaatttccagacgaagtggacggtagttcacattcgggtcaatttgtgcttcaacttccgggagtggtttcatctccaagaattcaacgatttcttttacatgtggtgtgatttttccaaacaagtcaaaaacatattgttcatcaatttcacgttggattgcacggtccaacaggtgcggactgtacttaatgaagaatgcttcaaggcctgcttctttacaagccttgttgatagcattattaattttgaggaactccgtttcaaaaatgcgacgaagtttattgcggcgaatgtaaacacttgaatcgatagtagtcatgattatctccttttgtttgatgggataatcataactcatttcaatctgcttgtacactactctttaaaagaaattagcttattcattgctttggcaacttcatcacgaacagcgtgtaaattcttaatctgttcaagacgttgctcataatacgcgatttcatcttcttccagacagtcgtctttatcttctttaagatatcgagcatagtcctggaaagcttgacgaatcacttcttgaaagtcgtctaagccctggattttcttgggttttgatgtgaatccaaacggattggaatcgcttatgcggcgatgagaagctgttgataactcatagtcaaaaccagaattaatctgcgccattagtatttttcctcgggttggaaaacggaacgacacgcccacatagaagcttctttcagacggtcaattgccgtacgaatctgggcgatgcgttcatgagtgaggttgaattcttcatcactcattttatcaacacccgagcctgtaaaggcttcaacatattcttcttctaatgctttaaagattaagcccaatcgaacttcagcatctttaatagcattcactttaccgattttatcgtcggtgtgtggcttataacctttgatatcttcaatcatttcacttcctcatcagatgcattatcatattctaccaaacggaggccatcatatccgccacgaacagagatatatgtactcggataaacaatttctttaccattccattggccaccgtcccaacattccataaagccttgttcgccctgttcgtggaaccagtcaacaaacatcttcagagcttcttcagaaccttcaatagtcaatttagacatattttttccagtcactaattaatcgcacatcctggtcataggtcaggaggctacgagttataatacccttacacggtccagaaataaattccagagtaaagtaaggaaccaacttcatcaagcgaatactcggagcagtgcaacgaaatctggacccaataaaaggtccagacaaaaacacatactcaaagaaattagctttattaaagatttcataattctttacaaaatcctcagaccgaacctttggaataaaatagagttggtcaaaaagctcttcatgggtcatcattgcattcctatcacaaagaacaggggcaggggtttagaaccctggcacataaatttattcatcattgtctgataagcttcatagaacttatccatcgctggaagacgcattggctcttcaataataatcaataatcgggtaacagacagcccacgatacttgtgaaaatgatcttcatctaaaaatgaacgaacagtatcatatacaacaaaaccaggtcgttcaacattaagatgtggctgtgctttagaaacccgctttattatatcacagatttctcgtgagcgatgcgaagaactcgacataacaattacatcattacccttagaaacccaatccgcagcgaactgtgcaatggcacttgttttacctgtttgccttccgccgtcaagtctaagagtaccaaactcttgcattcttgaagcgggttcataccaggtgtattggtctgaatctaagcgttcaatggcgcgttcagcgaaggcgtgcattaaggttagataaatgggagttaaaaatttcataattgtctctttttaagttgtggggccgttccttggcacataattcatccgtgtatccgtatgtaaaccccttaccgcacttgggctcgaccttattacaggtagggaaaggtccatcactcagaggacgcgacgttcatgaggagagggccggcttgcctttattagaaagaaccagaacctttaattgtgttctggcgacctttattttctaattcagaatggtcgatttcgtatgcttgtgctacaccaaaggcctttttaactttagctaaagaacctttagatgtaacaatattaaaagtattgcctttagtaaaatcaaccaaatccacttgtacaccctgtttaccgaggcttgctacaatagcatcaacatattgttggtctaaagtaccttggactccaatttggaatgctttaggggctttggcttctgtgataaattcttgataagttttcatttattctctccaagttgatgggataattatacactatcccatcataaagtaaacagttatgctttaccgccagaaacaataccaaaggtctcaaagtcccattcaatatcatcaacatcaactttcttaccagcaacaacaaatgcgatttcacggcgttttgcataggtgacaatttctttaccatcaccgccaaagaaagaatacccattacgcttcatggtgccaaagtcttcagcatcgccagcaaaggcgcgaactttaaaagcaccagtaggagctttggcagattcagtaataaattcttgataagttttcattttatattccattgtttggttgataaaatcattatacaacctttttagttaagcgtacacagctttcccatagtatttgtaccaggtaggcttttgagaaattttctcattcagtctggcttgactgatttcaattgaccagattgatggttgataatcattcttccattcatcaggaatatcatttaaatcttgtgtagaaatatcttttatgttaaaccctcgctttaaacattccgcaataagttcttgatgccggtttttaaggaacaaaagcttatcataaaagaaggtgacatgaccagtccctaaaagaaaagatgatgggattttaaagtcagacacctttttaccattttgcacatgcttacgaacagcgccaaaaacgcgaggaagttcacgatattcagccataagatgttggtcagcgagttcagataccagggttaaattaatgcgagtcatgtttgttctccgtagttgatagggtcattataaccctatcatttggagatgtacactaatatgcgtcaaaagttccggtacggaacgtttctataactcgtttggctcggttcggagtctggactttataccatcttgagtccgccagttccttggcagccgcttcccatgatttagccttcagtaatcgcatacccttaggaaaaccagcaacaccagcaacacccatctggaataccatattaatgagtgcacaacgacgaacttcatccagtacatcataaacaggttttaagacaggatgcctcaagattccggctttagccttttcgaccgaacggttaaacagtgtttcggcttcgtgctgggttatacgaccattacaaacgcgacccatgagcttatcgagctcggcgcgagcaacatctttagatgggttcttagttatcagttgcccgatgccaatggtccaatagccttcagtatctttatacaaatccaacttacaaccttcatctatacgtaacatttcgaatatattcataatacccccttatataggggtatttattatccgaaaatttgagtcattaccttgtacatcgatttgcccatcacatactgccattgactcggtttaatcagagcaaatgcatcgaactctggaaccgaactaccatccgggaaggtatgataggcagagcatttactatgtctgaactgctcatgctcgaccggaaccgtgtacagaaacaggtgaagatttttgttatctgaataacggaattcacccaggtcctttaagaatgctgggtcatattgggtaaacccggtttcttcttcggtttcacggatagcagcttcaatcggggattcaccagcttcaacatgacccttagggatgtcccatttgtgtgcaggcatacctggtttacgagaaccagtcacacgacccatgaataactctttatcttcagtcatgaaaataatgccggcggataattctttcaccttgtttttcttactcatcgtcacgtttccatgattggttaaaaatatcactcattaaaaattcaagtctattttccaatgaaggagattcactatcagaagtttgaattctgtattcagaaatcgggcggaacatatctaagtcagtttctaaatcatctttgattttctcttctgatgtaccagtatcataggaatacagataagaatcacatgactcggatttaatataaattgcaatactcatttacggcattcctcaataaaggagttcaatgtatttttcttagtgatatcgtcatatacctttttaactttagaaatacgaaaaggtacttcaataaccatagtccataaaaatgatgcaataagcccagcgagagcagtagaaaagcacgcacccattacagctacgggtgcttcatttttgcctgtcaagaaaaaccacagaaacggtaaaaataagattccagcccaggcataaaacctggaacaaattaacttatcaaattcatcactccaggtacgaaatccatatttcttgctataagaaattaatgggtctggtgtctgttctttgagcggttctggttgatgcccattaataatgtatcccattttatattccttaattaaaagctctttcacatgacgattgcatcgcgaccaatcaacattttccaccttgattccttcatcaccatcatcaaggttcgcccaatattttttggtaatcataaattcatctcttgatacaattatacctgcattttctgcccggcggatgaagtttacatcaacacccatgcacccgggctcataaagggccattaccagccctccatagggaattccagatatacttgagcattaacgcggatttcatttgtaatctttttaacacggtcagtattacgagacacacgaccaaaccagcgccacccgttacttactgcgcgagaacctgtatgccatgtctgccaatcaaactggagcaatgtgcggtcaggagcatcccacttggttaattcattggactcaattttttccagaacttctttatgccactgacgatagataagttcgccttcaggaatctgactaaattgtgcagttccggttgcaaaataagtaggacacacatcagcgttaacaagaccaagaatatgttcagaatggtaacgaggattatcataatcaggttgccctgcggtaataaagtgttgacccaccggaatatccggacgtggtacatcgtcatggtgataacctgggatagcaggataccaaccaggcatcagcatatgaacccgagaatcaaacaccaaattatcggggccatcagtccattcttttggtaggttatcaagaaaactgcgcgtgattggaccaccatgctcatacgcaaattctggatagcagttaaagaacattggttcatttttgatttggtcattttgtacgttatgtgcaaaaccaccaactgcacgagcttgactattaaaagttttcggaccgttcataatattttcctcattgattgtgggaccattgtgtcatagtcccacttggatgtacacaattatttttcgaaaggacgaattaaatgctggttagctttgaaacgtttaacatagtcttcatgacccagggtgttgtacatattaaccacttcctggtaatgttcccaggcatactcgcggaaccatccagaagtaatggaggtgcagactttttccagcgcaatattgaagctcacggatggagagatattgaactcattgggaacctgcgaacgctccagagcgagtacacatgcttcttcataaacccctgccagtttaataatctcagggagtgcttcaaatttttcacgcgaggtcataacttctgaatcatccttcatatagaacttatatgcaggcttatcagcaagcgccacggcctcgtggatggagtcatggtcaagggtatagattgtatcattaaagaaagttttcttgcccacgtctagtttagggtgactatatgacaatgtttctgcctggcgctgcagcatgattttatgcagttcgtcattaagaacaacacccttattgcgaaggtaattaatatgactcattgtcttcaggaagaatggattgttcttcaggtaacgatgagacagtttaattgccagacaaatatcaggagtcgcccaatagaaacctgtaagacggtctttcttaatatgattttcagcgtatttcaagagacgataacttgaggtgaaatcttcatcttgaagctcaccagtaatttctcgtacgttagtcagggcacggacaatataagcttcaaaataggtttcttttccattgtacatacatttaaaagcttggacatcagggttatccacaggaacatgagcaccgaacatacgtgctttaaagtggttccaggagccctggtcagcgataaagtcccaatcagagttttcaattttctgactttcaatcagaccagcgttatgtaatgcacgagaaccaataactaacatcataatattttcctcattagtaaagacgagttacttcatattttccaagtgccgattttttcgcttcaattcgtgaggcagcaagattggcggcctctagtgaagaaaattgaaccacttgagaagtattctgtcttactccaccttgcgggtgagtgacaaaaacaataagaacattatacataatattttcctcaaataataccgtatgcgtaaatatctcttttaatgcaggaaactacttcttccaaagaatcacaaacacgttctgtggcgcctgcgtaatcaccactgatggttactttaataccatcagaaacttcctggagattaacctccagttggttgactttggcttcgttcagaactttgattaattcgtttgcgatagacatttttattctcctgttctgataacgcgattgtcatcagttgataggagtatagtaacacagttttttagacttgtatactgcttctacaatattctaaaaataatttatcgttgtctaccttatcccaacgacgccaagatggattccagaccagagcgttgtcaccgcaatcattgagcttaaagtggtcgtagtacatagctatatgtctggtttcgtcaccagagaaccccagtatatgctcaccgtgggtatgatacatatgatgatgcattgagaggtcgcatttgtaaaacatctcacgtttaccacgaacgaacaagaaggcttgcccattcatatagaattctttatctgttttcaaaagatatttgaataccgaatctttatgcataattcctcctaccacatccttgtgattaaattattttcctaacgaaatacgagtaggttttttaccgaaatattcttcataggaaccatctaaacgacccgctttagaccgacaatacgaatcatactttttgtaataagtcaactcgttattataacgtggatgtctatcagccataataatacttaatggccaacctttggcataatcacgaagaccatttattttacgaatatatcttttctttaattttagcatgagctcgggtgccagattttaccgtcaggttgagcaacgaaggtacgaccagcttcttcaccataacaagagctgttcagccagtcttcaagacgaacctcaccatcatattcgtcaagctcaataccgaaatcttgagcgttagccatatcttttactttcttatacaatgcagccagttcaagtgctgctttttctaattcattaatatcagacatttttattccttagcattcgtaagaggatgatacccaagaggtaccactaatagtaatacaaccgttataaagcgtgatatgtcgttctaagtcacgaacaccatcaatgtagatatcagcttcttcgcgttcttctttacaaatctggataacgttttcaatagctgccgcggcagtacggattgcacaatctaattcacgagacatataattccttaacattcagaagaggaggacacccaaccgccattttccaggtcagttgtatagtcatgagtgttaacaatagcccattcaggatgaccatgttcttcccaatgagcaaggtcagctttcaaggcgccaggagaataatagtcaccgcccataccgcgagcagggtatatattaaaatgagtctcatatttgtttgcgatttcctcggcacgacgaatagctttatggatatcatttactgcgttagccagttctttatttttacggtaatcattcatcatagcgtttccttagcacattgccgaagaggagacccaagcaccaactgtaacgacaccgttttcaacttcgccgccgttgttttcaatttcatctttaaaccactgggagcactcataaccgacaggataatatgtacggcctgaaccataatcaccggtaccgaattggataccatattcatctgcgatttcttcacagtgtttttcaatttcagaggtcttatttagaagagaatagatagctttttctgcagatttctcatcataatacttggggatagcaatttcaattttattcatgatttacattccttaataaaggtttcaaggtcattacgttttgttttgtctaggaacttattatactcagccattgctgaagcgtatctcttccgactaggagcattcaaggcatttgtgtgacagatatcatacacaacagggataaaataagccacaacagccggagcgattatcataaagaagcccatctcaataggcatgactccctcgattgcagccataaccgtggtcattaccagaccaaccaaaccaccaagcataccggtagcaatccctaataataaattggcaccaatatcatattcagccaattgataaacatgtgatgcaagactaggccgttccattacgaacctccttaataaattcttcggcacatttaattttgtgctcttcttgtagggaaacacatttttgttcccactctttaactcgtccacgatatcctttattcatatgattttgatgccacacatttatcaaaatcatactcaggactgtaataaaaggagctgcaattattagtgcccaggcgactccaacactaatgatacccatatctccacaaacaaccatcattataaccccaacgatgcacatggacagcgccccaaatggaggcataaggtctttatcaatcttgtctgcatatacaaatttttctggtttacttggcagatatagcgttcgcattttgaacccctttagcatattcacgacattcagcaataaaacgattaagtttacgtttccgtttacgactttctaatgtgtactcagccgccaaatcaagaagctcatctttatcataatttttaatatccgtataagcgggacgacggtcaaccattccaaagtggtcaccattttctaacatcaaataacacaccaaatggtcatcatcgtccgcattagtaagctgtttataatcacttggttcgtttaaagcatatactgaataacgtagtccagcgaattccactcgttgaatacccagatttacatcaataatttccaaggcatctgcgaaagaaaggtcttcagctaaagcaaaaataaaaggcaatttggtagtatcgccgcgacttgttgttcttcttaagaaatcattggaatagcccaagtcgcggcggattctataaagaactgtgttagtttcagtggcaagaccactaccgccaaaccattccacatttgataaaagattatcatataaagtcataattttctcctctcccaattaagggggctttgccccctttatcttacttaagtgaattgatgtattcttcaatgtcagcggacgtggtatccacaccaacctgtggacctttgaaggtttcaacacgcatcaaggtgtcttcaatatcaatcttagtcaatgcagcgatttcaacaacatcatctgcagtcgcaatacccagggcagataccttacgggtttcgcggatgtattccagtttaacagctagttcctgacgagaatcatccagctctttaactttcaatttaatttcattacgcatttcaacataatcgtctgccttcttacgaagttgtttagcagtgcgacgatacaggagacccagtttagcatggacctggacatccgcgccatcagcaatcagtttgcggatttcacgctcttttgaagcggcgagttggtctttttcattcgctaactcgcggatgcgtttttcttcattaacagacttaacgtgggcggtctggagctcagtaatcttgtcaatcagggtagacgccgcttgagtatattggtcttcaatagacaggttttttgccattgcagtacccagtttggagcggatgaattcaacaagtttctttaaagtattcatggtatttccttcagttggttaatgttttattatccagggaacatactatcatgttcccattaaagcactaatttagattttgttttcctgcacaccatagtaaagttcatcagacacaatatccaggatgcggcgaacatattcatcatggtattggcagtcaaaatcaaatgcaacagtagtttccgcttcacgagtgaatttaacttgcacattcaggtgattaacaacgttagttaatttatcagtaaagaactcttttgctaccgcctgttggacttgcactttaaacttggtgttacgaatcatattttcagcagatgcgaaattaccagttttatcaaagtcaacaagcgccaggttgatgatgaatttcattttattctccagtgttttatttggtaactcagtatggaatcattatgccttaaagcagggggcttgtataccccctttttgaattaaatttcaaattctttgcggaagttggaagcataagactgaactgatgctttgttgaatccaaactcacgcacaatcatatcaataacagctctgcgagcagcaccattagacatattaacagttttgaacatatcatagcataaatctttgttgctcataccggagcgtttaggtgccttacgttcagctttaggagtaggtttaacttctggtttaacctgtccatcattcagacctttaaaaattttacctgccagagttgccagtttagcagcttcgccacgagtgataccaaatactgccgggttaaatgaaataccttcagctgccagacgtttgaagaacatacgtgctgcggattgtgcttcagcttcagaagagttgtttaatgccagcttaacgtacttaaccagttttgaagttttcattttattctccagtgttttatttggtaactcagtatgggataattatacactatcccacttggaagtaaaacacttttctcaattatttttgagctttgcggaagttggaagcatatgactgaacaacagtctttttgatatcatgggtgttaaccagaacatcaatcagggcgcggcgagctgcaccatctgccatatcaatttctgcaaatgcctggaagcaaatgtcacgagcattaccagatttggactggattttttcttctttaacttcttcaattgggaattcaatcatttcagcttggattaattcaatgatagattcttttgactgtttggtgtttaccttcagttcagaattaagggacttagcgatggcaacaatctgggttgaagtcagatgaataagtgcatcttcacgaatgcagatttcacatacttcgtcggcaaccattttgttagtgatgcgggtaacagagaatgcagaagtcagggtcaggaagttcattttatttctccaaagttttgtttgattcagtgtgtaactcagtatggaatcattatgcatccagtcaattcggatgtacactactttttgaagaaatattaaaaataaacccgccgaagcgggtttgattagttcttataaaagcggaacggatttatatgaaaggcgagcatagccttagggattggtcgggacagaagactcttgagcttccagccacaataaacgcgcagataaaaggtgattccaccgaccttgagataaggaacagaagcaaaaacaccccaggcattatccgtccacatccagagccatccgtgatgagctttatccggggagccggattcaacatcaggattacctttataatggaattctgaattgcaatcacgaccgagcttgtggtaagcaaaattgtatgctttgtttcgccagagccaggctactcgttggaagtaaacacctaatggccattttcggatttttgaccaacgctcgacatgaccccggtcaccatcaatcggattatcataagtcatcatccaatcaaacccgaacggaagtttaccagtctttttattatggaatggaactacaaatggagccaggataacggccagaatcatggagataaaatccagtggaactaacagaatccaactcaaatattttaacagtttcatacgtttctctttagttgatttataaaaaagccccaacctttcggaaggggctataccttgtcggggttccacctgcaaggcaagtgttcttatccgcgagcgaatgccattgcggcgcgttcgttggcacggtcggtgatgttcaagaatttatcacgagcgatttcgattggagcgccaacccagtcagcagcaccattacctggagactgtttagggcgaaccatataagttgaaactttagaaccggccagtttggcacctggtgccgcggcatttttaacgtctttagctttgatgccaaacccagttacgataccccaagaaacaccattaactggtttcttgaacataacacggtcaccaattgaaacaccggctttttctggagccactaaagaaaatttaccagcttcagtcagtacggattcggtgatggtattgcgatttaaaaattctgcatatgtaagcattttgtttttccattattagggttgttgttaatatttatattccatagtaccggatgcaccatccgctcggatttctcatactaccggacgcaccgtccgctctggaaaaactccgttaaaagggtgcgccgtttcagctgtggtagtaaagaaccagaacacagtaaaactgtgggaggaactatacttcagggaacgtcagtccgacgacttaccggtagcgacccggtttctcattcaattgtaatagctaatttgactttaacaaccttataattggaatcaaggtcattgaattccataaaatttgttgctaatctgcgagtcgggaaacttagatatttattatgctcaggtggagcagttaatgcaaaccatgggacttgtttatcattttcatcaaactcatcaaagctataaaccagctcgttgttggttatatccataactgcatatgattcactaataaccataatatcctcggtaattggtcggggtggtgggattctaacccacaacctacggtttagaagaccgttgctctatacaattgagctacaccccgggtggccccatccggacttgaaccggaaacctgccagttatgagccggatgctctaaccaattgagctacagggcctaaaattaaattacaaatccagcgggagcattatcatctttaaccatatgctgaattgtatgataagtcatttcttctggtgcaaccagataagccgccgtattaaccaacgggattaatttgactttattgaatgttgaacaaccaattgacataaaggtttcacctgttggatgctgaatttcaccaaattggcactcatacgaaatagagcaacgtttggtagtggttgtctttgttttagggtcgtaaaaagctaattttaatactaacataacacctcaagtaaaattaagtaaagtaagtttgattaatagcacatgctattatgaaaggttctttgagggaagaacctttggtaatagagggtacttattaataataacgcgtttttgttaaagcatatcaagcgctttaacagatgggatttggatttcttcttcgattatatatagcttaacataagaaattacacgcatgaaatcgccagcatattcgcaagccataccaaggagctcagtaagggcttcattcaggtagtattcttcatcatcgccatttagcaatgcatctaaatcttctacacccaaaaccttacttaaaaattcatgggttaactgaccagattttacgccagattcaatgtgggcgataaccaagtgtttaaccacatcccattttgaattaccacatttgttgtggttgttgcaatgcgaaccatggaaaagttccaggatatatttgtactgttggatttcttgttcttctacgccaaataccgtttgggttttataattatcaccatcattttcccaggtttcaatttcaatcacataacctttagggatggtctgaccaaatttgatattcataatcaaccttcatcaacaatagtatgtgtattagcattaacaatctgccaccagtcaaaacggttggaaccataacaaggcttcttctcgttttctttaatgatatcacgcagttcatcttcagtcgcagcttttgcaattaagtcagcataaccgccacgaggataatagctatcacctgcaaagagcaaaaagtttgttttgatattcttgaattcttcaagtgtaataactgttccattgggttgaacaatatccacataactataccctaattcctgggctttatctaccgcctcaagcagggtgtcgtgtgcccacccaatttgacaatctggtttttcagatgggtttgcctgataatccgcatacactttatacattttactcacctttggagattttatccataacgaaagagattgaaccaattaaaaatgcaactactaaagagattatattctcagaagttgaaagcatattcaacataaagccagcaaacatgctaaaaccaaaagcggtaacagcaacaagggcagtaacatttctaattaattcgcaacgtttcattttattctcctcagtagttgatgggataattatacgctatcccattcaaaagtacacttattttttagggatacgatagtaacgcatctcaacatctttctgcttgtgccactttttgataaggtcttcagaacctttaatggtaacgatgtcatagcgaccatcatgcgatacttcagcacttaactgcatgaagttgtctagtgaacggcgcaattcctcattagaaaaactaccacgcggggaaccaacataagcaaactcaacttttgcatctgcggcttcgttaataaattcttgataagttttcatgttgtctccagtagttgatgagataattatactgcagttatcccatcgcgtatactttattttaagtcttccagacgttttttcatcttggtgccgttcttagcaatctcgcctgcatcagaacaaagagcaaggagagctttaactttaccctggtcgcctttaaaagatgatgcatctactgaatcagcaagttctttgatacgtgcaaacaggcgctctgcttcagcaagggcttgaccaagtttaacttccataccatgggaagattctgttataaatgtttgataagttttcatgttgtctccaagccataaaaaggggataattatccccttttgttattacatcttactaccacgaattacgccataagcagcgaagtcgtcagtgatatttttaggagtgtttttacccgtttcaatgaaagcgatgcttgatttctgactaaaagaggtaattttgttatagttagagtcaaggaaggtataaccatttttacgcagctggtcaaagtcttcagcgtcgcctttacctttgaagtcaacccatttgtaggtgtttttcttctgaaggcccagaggccaggtttttgcttctgccaggtaattgttttctaccaaaaattcatgaaaagtttgcatttgaaatcctatttaagataaattgcgtattttttataaccagccgtctcatggcgaagacccttgtcattggcaaaacgctcaatgttattaatttggttctggtcaagttctgaaatgccaaacgcgaaaaagttgcgtttgttgccaattgttatatggtcagttaagtcaatgctatacaggtgattgatattgtcaatcatagctttgactgctttactaatttttacttcttcatttagttgtgactcgttgaaaaattcattgaaagttttcataagaaaccttatttataaagttttgctagttctttacgtccgcgagcagacataataaattgttcatcgccaattttaaaataagccataccgccgtcaacagcgataccaatttctttagtaccttctttgcctttccacttgccaccagatttcaggacagcttcaactgcagctttggaatatttggacgtttgaaaacgttcattaccaatctgaaagaaaacaccatctgcatttttggttaaaccaaatttcagggagccttcactatcatcaattgatttggtctcattgatggcggattcggctaaaaactcgttgtaagttttgatgttcatattaactccgtttgttcattcgttggtgtaggaacataatactgcacctacacttatttgtacactactttaaatccgccgaccaatttaattttagcggttctttatattcacggtctaaaacaaccggaatctgaacttctcctttatacgtcaaaggaccaacattataagacaatgttatatgaggagtatagtccgggaaatcatgtgttgcgccaatggctcgtgcatacatatgtctgcaactaagataatctgaatccagtacaagaaccagcgtgctgccgtcgtcggttttccatacttccaggtgaccagagttggctacttcgaaactaccggaagcaacaacatatggaatatttactctggaataacaaatagtggaatggaatttttcgcgaggaacggggttaggtaccttaagagagcgctggagattttccagcgcatcaagagttaattctgaaaatttggctgcaacataaagtccttcagagacttcatttaatgtcattattcttcgtcagctgcaggggccggggcaattttatcagcgacagcctggataacatcttccagcttaacagtttcaccggtcacgccaaccaattgggcaatctgaccaagtgcattaacaaactggtcagattcagctttaatgcggccagcctggtcttgagtgtccagaatacgggatttaaggataacgatttcggactgcagtttttgttcaatagtttgttcagacattatattaccttattaattttatcaaaaagttcttcgagtgtgccatcgtttttaataacaatgtcactagctagtggtggaagtccagcttccgtaatgtgtgtatcggtagaatgatttgcttcatcgcgttctacaaagattattgtagcacccatcgcccgaagcgaatcaagttcgttcttttgacgaacatctgggacaacgtaatatttatatccagaatagaggttgtcaagataatcgcacgcaaaagttttaatccaaaacatgctgtcgaactctgtacaaacgatgtcagttccaagggtctgcatgaaacgtctaactgtccagggctcaacattatttagtgtgtgaaattcaatgattttacgaaccatatctggattcggaaggtcaagattgtattgttgtttcaaccattcaagagcatcaaccagaagaatataagcttcggtgttgttcattatcaaggttttttcacggtcataaccttgtccatcaaaattttccagggtcaaattgtgtggcaggtcttgacgaatccacgctttataaagcgcttctttaatcggacctgcaagctgccactttgttccgttttgactaataacataatcagcagtcgtatctttaccactgcgttttttacccacaatcgcaattaatttcatacgtttctcatagatggatgcattgacttagacctgatttcctgttgcattgctgcattactatcaatctgtggtctaccttctattattataccatcaatttctacagcaaaagacttaaagttaaaagttgctgttgcattgatagccgggtcagaatcttctttatatgagtactgaatctctgacaggtcggacggccatgctccatagtaatggattgacatgacaattttgtccttgttgttatctaagatatgaagcgtgaccgcttcggggcgacccttcggatgccatgccttcgattcgtgtgtgatgtagttgttgagcgagagcatccatttataaatgtcaagccatgctcttaggtctttgtcacacagaaagttaacaatcagtgggtcgaattctattgtactaccaggaagactggagcgatttataccttgtgttcccccaggaacatctgtcacagggatgtgaacaccagggagggtaacgtcttgaacgttgagtttaaaggtctgtgtgaggtttgaatcgcttacctctaatataaagttagtcgtgttagtttgattatataaacctgacataatgcaccttgtttgctttaaaacaatcagtgttataatggttctagaccttttgtccttaccaataacactgaccgataatagattatgaatttctccatactttctgggaagagaatcttttgcctttcgacataaattgttgcaacggaagcataacaacgtttgcccagtcgctgggcttgatttcagtgatagtaccttttatattgccaggtatatatgctttaatcatctggtcagcccctttaaatcccttcacctttgaccaatcaatcttcagatgagtcttgttcgtaatcgtaggagtattagcatattgcttaagaagttcctcaaggaactcttgacgtgccttcggtggaatatagtgcaagttcaaaccgtacatcaaattatgcttacctagaccaagataaatgattaacggatatttgtcccagtacggaagagtatccttatgctttgcatcatagatataagcataaagtttgcctggttgaggtttagccgttacgtgaccgcgaactgatttcttaattgtctctgcgaaccatctggcggatttggtgttgcttgcagcgccttcgttagcaatcttatctcttatgctcttcctaaagctattcaccattatcagctggcgttcagccttcgtaagtttaccagcaggtttctttttgagcttggatactttataagcagtctgaattcttgaatgatacctcgacatgcttttggtaaaggtcgaataattgattcctttctcttcagcaaacttcttcgaggtcattcccttttcttttgctgtataaaattcaacccctatctcaacccattgttgttcggatttactgggtttcggacctggtttatctgcagattcattgataaatgtaaaaatactcatcctttccatcctaattttttcagtgagttttcagtgattatcctgaacgttatacccattttatctgcggtagcttgcgcagctttccatttgtcagagttaacactccaggtgtacatctcgttaataaatctctttttactcgcggctgtattattaaccggtttggttggaggtcttgtttcttttaatggcttaacttcaaaaaagaactgttgtcctgtatcaaacttaacccagaaatccatataatatctgcgctttttcccttcagcattgcagaagtatggaataatcacagtctcagaaccccattgaacaacgttcggatggttgtcgagccatctcatcaaccacgcctcccagcttgaccggtattgtattttcttccagtcgcccttatatttttctatattagtgggcttaaatttcccggagtatgccatatagcctcctaataaatattgatatacttatttataaatggaggctttatgcttttttcattttttaacccaattgattatgatgctaaaacaatcagaaaaaactcggcatcattaacgaaagaagatgtcttaagcatcccaatgactgacatcttcagaaactatcgtgcatattttgataaggtcgcggttaattatacaccgaaaacatattacatcgccggagctccgagacctgaagaacttgcatatcagctctatggtaatactcaactctattgggttctccttatgcttaataatatctatgacccgtattatggttggatatgttcacaagaatcatcatatcaggcatcaattcaacgctattcgaatataggtggtaatcaggtcctttatcatgtaaatgaagacggtgaaaaattctggaatcttgtttcttatcctgataatccatacacatggtatgataaaggtgataagaacaaattatacccacagtatgaaggcccattagctgcagtggatatctacgaagatgctattcgcaaaaatgaatataaacgagaaataaagataatcgaccctaatgatatcgaatcatttatttcggcattaatccgcgagatggagaaggcgctatgattaatatgtcagatagtgtaagttggttcgtcggtgttgtcgaagaccgaatggacccacttcaacaaggtcgtgttcgggttcgggtatggggtatgcatccatatgagaaatcacaagggcctgtaaaaggtatcagaactgaagacctaccatggatgtccgtactgatgccaacatcatctgcatcggtttccggtattcaaactgccatgactggtatggtaccagggactcaggtatatggtcactttttggacaagtggaagctcaatggattagtccttggtacatatggctcagcatcaagacagaaggcaaacacaacagaaggttttagtgaccccacagggcaatatccactttatgtgggcaatgatgctgctgcgcttaaccgaggcggtgaggtcggttatgatgacacttcaaacgtaatacaagatgcaaacactgatgtaggtattaatccagacgggttagatttaagccaagttaagcctgatgataatcctaatttcacaatagaaaacatgcttcaccgcgatgaaggtcttcgtctgaaagtatattgggacactgaaggttatcctactataggtataggacacttaattacaccacaacctattagagatatgaatcagataaacaaaatattatctaatcaaataggccgtgaagttaaaggtaaccctggtgcaatatcaatggacgaggcttctaagttattccaagaagaccttaaaaaagtccaaaatgatataggtagacatagtgttgtaggtccggtttacaataaagaaaaccgttcaagacaaatggctcttgaaaacatggctttccaaatgggattaggtggacttgctaaattccgtggaatgcttagtgcaatgttaataggcgattataaaaaggcatttgaagaagctcgcaattcagtatggtttaaccaaactaaaggacgtgcatcaagggtatcaatgattatcctcaccggtaatatggaatcatacggtattatggccccaaaagaaatggaatttaatgggcgttcttataggatgattcaaacctttgcagcccctacaaattccgacccggccgacccgtggactccagaagatacgaggattctgtttaaagagccagaatcaagttacaagggcgaatatccttatgtgcagacaatgcaaactgaaggcggtcatattcaggaattcgataatactccaggacaagaacgttatcgattgattcatccgactggttcctatgaggaagttgcaccagatggtcgtaagacttcgaagacggtagccgatggctattatatgacccagggcgattcaagcacttatgttggcgggaataataaagtcaacgttggcggtgatgaaacctattacaatatggctaacgttcgtcgtcagaccgatggaaacgaaaccatccatattcgtggtaacgaagagaaaactgtagaaggtaatggaacactcagagttaaaggcaacgttactgttattgttgaaggaaatgctgatgttactgttaagggtgatgcgactaccttagtagaaggtaatgaaactcgcacgactaatggtaatttaaactggactgtaaatggtaccgtatcttggacttgtgcaggtgcttggtccgagactatggcttcaatgagttctattgcatctggtcaatatactattgatggttcgaggattgacattggctaatatacttccaatgagcactgacctaggagactccatggaaggagcctcaatcgatgttacgtttacagctcaattagaaacaaacgaaacattagtcgaaataaatataactgaatatgaggccacccctggcgttaatgttgagggtaatcatctttatggtgtttatgaatccgtgttcggatttgcggatgatgcacttaaatatcggcttaatgacgaatttaaaactgctggttcatgggaagaccttcctaccgataagagtactcaattgtatctctggagggccccatcgagcctccagaaggtcttttcatacacggtaaccctaacctatgactttcaagaagagagctctggcggagacacagggaactctggtggcagtaatagccgtgcagttaatgagaccgacccacctcctgtgccagtaagaaagacaatgacaaaagtttacacaaaaactatcgttggcaactggtcaagatgggcagataaattgcgttcatacgtatacgcgagggattaatggctggattaagttttaatcaatgtgttacagcaggccacgaagcatggccgccgactgtaattaatgcaactcaaggtaaagtattcaccgggggaattccagtattagttgccggagaccctattaccgagcataccgaaattaaaaaaccatatgaaacccacggcggagtaacacaaccgcgtacatcaaaggtatttgttactggtaagaaagctgttcaaatggcagacccgatttcatgtggtgatactgtggctcaagcctcatcaaaagtctttataaaataggaaataaaatggctactcctacgaattaccaattaacaagaaccgttaacgctatcccaaaagtatttgtgggagctacgtttgaagaaattaaaaagaatatcatcgactggttatcaagccaggatgaatttaaggattatgatttcgtaggttcgcgaatgaatatcctgattgacatgcttgcatataatacattgtatatgcagcagtttgctaatacagcggtttatgaatcatttatcggaactgcaaacttaaggtcttcagttgttcaggctgcgcaggataatggatatcttccatcttctcgctcggctgcaaagacttcggttatgttgacatgttctcatgctctgcaaccatcgaatattgaaatcccacgaggaactaaattcctggcttatgctcgtgatacatcagctgacccttatgtttttgttaccacggaaaacgttatcgcggttaaagatattaacaaccaataccttccgattgtatctctggcacagggtcgtattattcgtacggaacttttatatgacccgaaacaacctattcttatccgcgacccggatattgaccgcaaagaagttaagttatatgtgaatggtgttgagtgggatgactggacgaacaaatcaatggttcacgctggttcgacttccaccatattttatatgcgtgaaacaatcgatggctataccgaatttttcttcggtgaaggcgaatccaccaaatctgtggccggtggcgttatggaagccaactatattggcggtcttaaacctgtgcaagattcaacaattgttattgagtatcttcgtacttccggggcagatgcaaacggcgctgttgatttcagttatgctgatacgttgtcttatatcacagtggataagattactgaaaactacaataatgaccccgattatgtcggtgctgatggtggtggtgacccagaagatatcgaacgtatccgtgaactggctgttgttaaacgtgaagcgcagatgcgtgctgtcaccggaacagattatgataccttcgtatccgaaagatttgggtcaattgtacaagccgtgcagacgtttacagacgctaataaacctggatatgcgtttatatcagttaagcctaaatcgggcttgtatctcactgcagtgcagcgcgaggacatccagaactaccttagcgagttcaacgtatcaacaattacaccatcggtaatttctccggattatttgttccttaaacataatatcaaagtgtcttatgcgctgaacaaattgcaagaatctgaacaatggttgcaagcacaaatcattaatcagattgaccgttattatattgatgaagttgaaatctttaacagaagttttgctaagtcaaaaatgcttacatacgtggataataccgaccatagtattcttggttcgtctgcaaccatttcgatggtgcgtgaggtcctgaacttctttaagactccagaatccggcattaaatactataaccagtatggcaaccgttcagtcgaatcaagcgaatttgaatttgttccgactacaggtgaagcctataacgttcgcattgttgcaactgataaagattctcgtggtgatggcaaaatggtaattggtccattccgtccgggtgatgttatcgaaaacgtaaacatccagccttacctacaagatgactttaataaaatggaagctccgactgaccaaacagtttattacgcaattggcgaaattgactattactctgactatattttttgggatatcgccgcgattggattgacatccgagcgctttgaagttcaatcaatcgaactttatgcaagtcccaaccaagataatatatacacgcaagatggttcactgattgtatttgagaatgaccttcgtccgcaatatacaaagattgaccttgaaccgattacactataagcctcttcggaggctttttaaggaaaccatgatgagtgttaaagccccttatgtaaccagcttacggattgataaactatctgctaaccaggttagcataaaatgggataatgttggcgccaacttttattattttgttgagattgctacgacaaaagaaaatggtgttgctattccagaagaaaatctgttatggaggaatttaggttatactccagacaatgaatggttcgaacaagattttattcgtccagtatcattttacaaaatgcgtgttgctgttgcagcaatgggttttgaacaatctgattgggtttataccgaagaatttgaaacctttgcaactaacgcatacacatttgagcacatgcgtgaatttacattaacaaataaattcatcgaagaaaaatttacaaacaataaccaagcttatatcaactttaataatgatgcaattatggcatcgctgatgtctgaagattttagctttactcctgcgtattctcatttgtcttcaatttcaaactatgtattaaaagaagaccaataccacgaaatccagggtagcattcagccggtatgtaacgatgttaatcgtacgatgattgctgaactcggtggcgtactgtatttgtttgaacgattccagacaactgtcaaagtctccaatgataaagggcagaactggtattatgtaaaattgtttaatgaccgtatcggtaacccagtatcgcgcacaatttattatcaatcagatacaacaacttatgtactcgggtatgaccgaattttttacggtcgcaaatcaagtgacataagatggtctgctgatgatgttcgattcagttctcaggacataacatttgcaaaaattggttcggatatcaatcttggatttgatattgaaatatttggcacatacgcaagacttcctgcttatatctcgacaattgccgaagcaatcactacgaccgattccatgatttacgttgctgggcgcgaccgcgtgtacaaagctaaatcttctgatgctccaattgataacgaccccaactccccaacattcggtgaaaaattatttgaagctggatatagcacaataagtggtaacccaaaagctgtttgttataagatggatgcaattgatggtgaagtatttgcattaatcacgggggaagtaaaagaagagcgacaagacccgactaaacctgaaaacgttgtcgattcgttatctaagggcgtttataaattaaatgctgacaccgatacatggacacgagtttttggtaacacagaggatgaacgtcgacgtattgaacatggttacacaagcatgtcaaccgacggaattgaactttttatcagttcaagtaatttccgttattccgttgaaccagataccgaactccctgctaagtatcctgaagaagttaacgaagcagtcaaatatgtgtatgatgaacaatggatacacgacaagcattatttgatgatgagttttaggtcgaataaagattcaggttgggaagagtttaaacctggtcgtatgtcatattacgctgaaccgttctttaactggtctcgtcgtgatgatactcgttgttggattaccacatcagacagagctctggttgtatataatgacatgctatatcaaaagattatcgatacctttggtggttcatcgcctgaacgtattgtacacgaatactggaataaaggccaagtaaaagttacttctcctaacatcgaattcaatggctttaaaaaatacgcctcgggtattatgttacacaaaaatactggagagcttattggctattttgaatttgactatcgtagacgtgatgaagttagattaatctggaaaccgaaagaagttatgttcactgcagaattacagaaccaggaacatgatattccatggacaccagataatgacgaacaagagaaagacccagacttgcgtcctcttttaacaaagatggttccagatagttatttgctccaggatagcaactttgaaaaattctgtgaatattatttgcagtttatcagtgatggctctggtacatattataacaaccttttgaacttaattcgcaaccagtacccgcgcgaggaagatgcatgggaatacctttggagcgaaatgtacaaaagaaatatatatttgtcaaagaccaagcgtgacgaagtagttcgtttctttgaagcaagacagtctgatttttgggcaactaaggggactgaagcatcctataaatttttgttcaaattgttatataatgaagacgttgaaattgatattgaatccaagaacggaaccgagtatgacataatcatcgaatctgataacatcagcgaagatattgttggacaaacaatttacacaccaactggtcgcagtaacgttacttatatggaacgtgactacaaacagggtaaattgagatggcgtatcacgattcataacttacttggtcgctttattgttgggcaagaaattaaatccgaaaggacttcctttgaaggtatgattgttcagggtgttcgtgggaaagaattacttagcaacaacatcgattatatcaaccgaaatcgttcttactatgtaatgaccattaaatcaagtctcccaacatctcgttatcgtaatgacgtattgcgatttgttcatccggttggatttggattcgttggaattacattattgacaatgtttgttaatgctggtctgtcattaaaacatacagaaactattatcaataaactgaacaactatcgttggtcgtctggtattccgtcagaatggtgcgaccgtatcgcagttattggggccgatggaaacattgagcatagtcctgttacaggtgaagcagtatataatattgctcctaatgcaggtttaccattcccattaccagcagattatgatgccgaaaacgatttttcggattttcatggaactctcccgtctgaacgtcgtaaaaaatacagtccattgtttgaccagtctgccgtgacttttgctaactggcgcaatttggttaatcaacgtcttaaggatgatattggtaatccacgcgacccgaaagaacccacacaggtaaaggtaaatgaataattcatctgtagtttatcgttcgataattacctcgaaatttcgaactgaaaaaatgtataacttttataaaatgattggtaacgagcccgaccagaatacgatgtatgtaacattcggtcgtgctgaaccctgggcttcgaatgagaatgacccggggttcgcccctccttatccggttgatacagcacaaggtgttgaagatacttggaccaatatgatgggggcagtcaaagtttataaatcaatgcttgattgtgttgtcccacgtaaagactggggcgatatcagatatcctaatccgcttaacttccaggtaggggaaattgttgtagctaacagtgctccatataaccgaactgatgttggtaaaggttggatggtttatcgttgtgtagatgttcctgatgttgggacttgctccatttattccattatcaataaagaagagtgcttaaaactcggtggtaaatggacggcggaatataactcgacgagagctccagcagggactggcgacactgaaggacgagttgatatgggcgatggttatctctgggaatatttgtatgagattccgcctgatgtatccatcaaccgttgtactaacgaatatattgttgttccatggcctgaagaaatcgaagaagacccgtcacgctggggttacaaagacaatatcagctggcaacaagatgattttggtttaatatatagaatcaaaggatatacaataagatttaaagcatttatggattccatttacttcccagaattcagtctcccgggaaacaaaggcttccgacagctgtcaattatatccaacccgcttgaagttaaagtacatcctaatgacccaaatatcaaagcaatcaaagaatactatgatgcaattgatttggaccgtcattctggggaaatgatttatatggaaaaccgcccgccaattattcgtgcaatggaccagacagaagaagttaacattatttttgaattctaactaggggccttcgggtcccttttttattctataaatatagctatatcaataacgaggcttacctatgattaatcaaaccccaaaattattagtagacatcggcgagattggtaacgccagcaccggtgatattctatatgaaggcggtcgtaaactgaacgtagatttagacagtttgtataatacatttggcgaccagcgtctatactccgtgaacaatggagaaaacacccaggttcttcacgcgactgggtactatcaaaaagctacaaatatcatcgaatggaactcaactgttgctctcggttctatgcgtgatgtcaatactgccgaaggtgttatcactgcaagaattgcaaaaggtaaagcaggcgaaggtgttatctttattaactccaatggttcattatccacctcgatgcctctggaagttgaactacaaggcacggattcattcctgaccgctgcaacgaacaaaatgaaatttactcagccttatacaaaaattacattgtggtgtattgacgatgctaacggcgtagggacctgggactacaaaattgaaagtatgtttggtaaccaatctgtattgctcgacaaaacatacaatatgagctcggttgttcgtgatattccaatcgcttaccgcgcagattataaaactatcaaattgatgcttacggctatttcaacagacgaaactaaatacaaagcatcagaaatgttactttacatcgaccttaaggaccgcaaggtatatagcacagaatacgctgtaatcagacgtggacaagctaacgacgatgatgagatatatgctatcgattttagaattgataaccaggacatcatacaggcggctataagctcacccactgccatgaagctcgctattaaagtaatttccgcccaaacaatcggagtaccggtataatgaaacagaatttaaaaattggcaatatggttgatgatggtactggtgattaccttcgtctcggcggtcaaaaaataaataataactttgatgacctttattatcagctaggggacggtgaaaatccccatgcagctggtgcatggaaaacttggactacgcaagaaggcaccgagttgtccgctgttatgggtcgaagctataccatcgatacatcagccggtgcagttcgagttatccttccaaaaggaacaactcaagaatacaattatgtaattcgcttgcgtgatgtgtttgctacctggcaaatcaacccggtgacaattgttcctgcagttggggatacgattaaaggctcaccgaatccagtagaaattaaacgcaacttagctgaccttgaacttgtatattgttcaccaggtcgttgggaatatatcgataataaacaagtcgataaaatttcaaataacgacgttgctacagttgcatcccaacagtttattgccaccgaaggacaaactgactttatcaatgtgtttggtgctattccatatagcatatcgaacttagaagtcaaacatcgtggtaacgacctgttttatggtaaagatgatattttcgacccggtgaatgctgaatttggttcccctggtgcaaaccctggtgaaatcgttgcgcttgatggtaaaagcatccgtctgaaaatgccatgtgctgaaggtgatactgttatcatccgaacatttaatgatggtattgctcaatggcgtagttcgtataatcgtcgtgatatacttgttcgtagtcaagacaggaccaaagaaacaacaattaatggttctttgattgttacagatttgacaaccaaacacacctttacaattgaagaacttggtatttctccgggtagcccaattaacccaaacgcatgtcaggtattcattaacagtattttgcaacatcaagctggtactgcgggaactccagtattttattgtgaaggtgcacaaggttctactgctgcagaatgtagtgcaaatggtggtagctggtctgaatcaaaccaggattatttgctgcaatttgatgatgataaccgtatcgaaggcattagcatttaccgtgaatttgaagacggtgatattctgtcggtcatttggtacaataacgatatcggcacaactatgaccatggatgaaatccgtgatgagactgatactctttatgtttctcagggaaatacgttgagcctaaccggtcgtgtgcgtattacagattttgataatccgtttgcaccaaacgttgaaccagtcggtcttcaggaagttgttccatcttctgttggcgctatctttgaattattctatccggtcggtacaatttacgaaaatacggttaacccaaataacccggttacttatatgggatttggttcatggaaacgtttgaaagaacgtgtaattgttgcctggtcagacgaccctgcctcaaacttccatacaaacaataatgacctggattctggtggtaacccacaagcgacagcaggtggtacaggtggtagcgttgaagttcatattaaagatataaacgtacctaaacttgaaactgatgagaaggttttagttgttgatgataatggcccgattgttgtcggtggttgtcaggtagacccggatgcacaaggtccagcctataccaaatacagagaagacaaagccaccattaaccaggcgcaagaccctcaagctcaaccggtttatacaatgcctccatatttgattgctcatcgctgggtaaggattgcttaatgaaaacattaacgaataaaaaggctggagtaatttcccgccttgctagttgcttagaatttcaaaatacatcaaaaaatattacggctgtcatgggtcaacgagcaatcggcggcccatctgcaacacaaacaaccgagggtattttttatccaacagttcagagcgcaatagatgatattgcgtttcgatatgagcttccggttggcagtgtaattactaatacgaataacctttctcctgcggcaatcagtcagtcggataaaattaaatttaccgggtctatttctggtgctggagttggtgatactgttttatttttcatttttggtattccagttgaggttattgtcggggattcggctgtattagttgcttccaaggttaacgatgctttgttagcggctgttgctgatagtttaattgtgtcaagctctgcaattgatagtgtagaccagtctatattaaatattacatataacgattatcaaaaccataattttgcaccttttgctcaatatggttgtacgcttagccagactattatacaacaaccgcgcggtggttatggttcctgggaatatcttggaacttcaacccagacattatcaggtggcacagcagatggcgcaatttcactttaccattataagcgagtatcgtaatgacaacgactaacacgctaaaacacattagcgataaatccgaatataaaacattcgacccgacgggaacagctttcccgtcgactgttaccaacgtgcaagaggctttagggtctcttaataaaattgcgttagatggatatatcccagcctcatccgaaacgaccgcaggactcatcaggctagccaccacacaagaagttattgatggtattagtccagactctgctgtcaccccagcgaccttaaaagctcgtttagacattcctacgcaagctacagaaacttatgtaggtattacccgttatgcaaccaatgccgaagcaattgccgggacagtaaccgatgcagctattgttccatcttcattaaaagcaacaattgataatgtttttactgttcgtgttggtactgaaaataacctgggtgttcttcgtattagtaccgaggatgcagctttagctggcacagatgacacaaccgctatgtctccgttgaaagttgctctggcaattggcaaagcaacagcggcgcttccaacttattcaactgccacacaaactgtttctggtttagtacgaattgctacaaatgctgaagtgcaagcaggaaccctgggtgacggtgtagcaatttctccagcaggtttaaatgctcgtacagcaacacaagaccgcgctgggattattcgtcttggtaatcagtcagagattaataacagtgctgatggtgttgcggtaactggcgcaactcttaatggtcgtggagccacaaccgataatcgcggcgtcgttagattaactactcaggctggggttgctcctggtggtgatggtgccggtgcactggcttggaatgctgatgtaatcaacactcgcggtggtcaacgaattaatggaagtctttctttagattatatttccaccggcaattttgattccaatacagctcatatgggcggtcaattactttctacacagcgttatgcttctgaacgggttccagttggaacggtgatgatgttcgcaggtgatagtgctcctcctggctggattatgtgtcacggcggcaccgttaatggtgaccaattccctgactatcgaaatactgttggaactcgtttcggtggcgattggaccaacgtcggtattcctgatatgcgtggtttgtttgttcgtggtgctggtaccggtggacatattctgaataaccgcggtcaagatggttatggcaaagaccgtttgggtgttggttgtgatggttcatgggtcggtggtgtacaagctcagcaaatgtcatatcataaacacgcgggtggttggggtgaataccaacgtaacgaagctccatttggtgcatcagtttatcaaggttatctgggtacaagaaaatatgcagactgggataacgcttcatattttactaacgatggatttgaactcggtggcggcagagatgctttaggtacgttaaaccgtgaaggtcttattggttatgaaactcgcccatggaatatgtctttaaactatattatcaaaattcattactaaggaccaaaatgattaataaactcagtctcaaagaactgccgtatagcatcggtattccagacgaaggtcaacagagaattcgttggatacaaaacggcgattgtatgactgcggccagtaccaaatatggtcatgatggtaatttgaacgccgctgcagttggcgttcaaacaaacgtagatacactcgacgacaactcaaatgcatctaaagaaaaaataaacgaaattattgataacgtcaataatattcaggaagctttgaatataacaactaacacggaagttgttaaacaaattgaaaaaaaccgtacagatattcttgaccttgatgaacgtcaatttaataccgaattgttatcaagcgaaacatctgaagaccttaaaaagttaaaagaagatgttggtgtttatgacccgttaaccgattcatattatcgcacagttcgtaatgacctcgtatggattaaaaatgaattaggccagtatgttgaccaagatataaatggtctccaggttatcggcaatccgtcaaaaggcatgaaacgccgcatcatcgataacagttcggctattgttgctcatggagttcgtattaagactcttgaagataactatcatgattctgatgttggttctcttaacgtaaaagtaattaaaattcgtgaagaattaggtgagtctactttagcaacaggtaaaccggctgtatttgttcgactgaatattcttgacgacaaagtagtcgaaattgacgaagatattgtcaacattcaagaagctattggttttggtaacggacttgcaattacaactcgcgttgaaaatcttggtggacgtgtttcggtcaatgaaacagatattgcggatatcaaaccaagacttgttaaggttgaagctgatatcggcaccgctctggaaccattaacaattaatggtcgaatcagtgctttgcgctcggatgttaatggcttacaggttgttgttggccaggattcaagctctggtttacgtggtaccactgcatggctttctcagagaatcggtacagagcaatctccggagccaaacactatcacgtataagttgaatgcgaccactacactggctaacgaaactgcatcaggccttcaggatgtacaggccgaaatcggtacaaatagcactggtatgaaaggctctattttgactttaactagccagatgaatggtacaaaccctaacggtgctaccgtggctgaacgtggtgttcttccggttgtaattaacttggatatgctgatggcgtccaagctgaacgacgcaccattggacaataagttatatggtcgcaagcaaggaaactggactgaaattatcgataccagaaccgagattgatgcaattaaactcgatactgcaaaaattgcaccattaaccactcgcgtgacaacccttgaaggtacagtaactccgctccctggtcgcctggatgcggccgaggcgaagataactactttagaaggtaaagtatcagccttagaaacagagctcgccaaaaggcctcctgtcgctcctgcagctgatggtctcccttatgtgctcgttgataatgcatgggttcttttgtctacattcgtgactgttggaccataacaaaagggcttcggcccttttttcgtataaatacagtaaagaggaaaacatatggcaactgaatcatacaacccgaaacaattaaaagatgcaatccttcgacgtcttggtgctccaattacgaatatcgaagttacgaccgaacaggtctatgattgcatccagcgtgcattagaattatatggcgaatatcattataatggttataacaaaggttatcaggctttttatatcggtcatgatgacgtttcacaacagaaatttcgcgatggtgttttcgatttaaaaggccgtaatatttttgcagtaacgcagattattcgtactaacgtcggttcattaacttcgatggatggtcaagctacatatccatggttcacagattttgttctgggactggccgggattaacggtggaatgggtagctcatgtaacagctttggtccaaatgcttttggcgcggaccttggttattttacacagcttatgcaataccgttcaatgatgcaagacctgatggttccgctgccagattactggtataatgacgataccgaacaacttaaaattatgggtaacttccgccagggagatgtgattgtaattgaagtttatacaaaatcgtataacggcgtggattcaatggtaggtaatacagctggatatggttttgcttcggccgattgtgataatccgtggaatgctggcgcacagtgggataacccggcgcgcagaataagcggcatgagagcaggtgaggaccttggacttcaagatggcgcatacaacaaccgttgggtgaaagactatgccacggcgctcgttaaggaagttaacggcaacgtattggctaaacaccaggggatgatgatgccaggtggtaccacggttgatggtgttcgtttaattgaagaagctcgtatggaaaaagaacgtctccgcgaagaacttgacctgctggatgcaccgactcctatattggtgggctaatggctacttatgacgcaagattattcgcccggctcgaagacgggaccgggtatgacaatatcaatgctacagagatattgaacccttatgtaaactttatgcatcatgaaaatacccagactttagccgatgctattgttgctgaaagtattcagatgcgcggaatgtctctttattatatcccaaggcaattcgttaaaccggatttgttatttggtgaagacctccagagtaaatttgataaagcatggaaatttgctggatatctggatacgttcgatgcatatcagggtgacggttctatctttagtaaattcggtatgactgtgaacgatgaaattacaatatcgattaaccctaacctgtttaaacaccaatgtaacggaaccgaacctattgccggggatttgatttatttccctctcgataacagtctgttcgaaattacgtgggtgcagccttatgacccattctatcaggtaggtcaaaacgccattcgtaaaatcaccgcgagcaaatacatttactccggagaagagcttaaacctgaattgcaacgaaatgaaggtattaatattccagaattcagtgagctcgatttacaaccaatccacaatatcgatggtcttacagatatcagcgatatcccttatgctgaatccaatgagattaacgcagaagcagctgaatatgttaaaccatattttgtgcagaatggtcgtggacttgaggctccacctaaggcaaaacaggatagctttgacgatagtttctttgatgaataaatacatttattaatgcgcccgaactgggcgcctggaggttactttgtttgggcatttttataattcgtctctgcgtcgctatatcgttttaatgggcgatttattttcccatgtacaagtggccagaaccagagaagacactggacttaaatatattaaggtccctatttcttatgcttcaaaagaaaaattcatgatgcagcttggaaaatggaccgctattcagaatacaccgactcctgacatgtcaccacaagaacgtgctgctcagaaggctaaaatcgagaccgtattgccccgtatgaacctacatatggttgacttgatgtataacgggcaatataaaacggctctccagaatcacacacaggcgcgatttgctaataacgaccctcgcaagcagatatctcaatattctcctgtgccggtcaaaatgattttcgagcttggaatatatacaaggcatcaagatgatatgttccagattatcgaacaaatcatgccttacttccaaccacattttaatacaactatcaccgaactttacacgaatgaaattacattcgaacgtgatataagaatcgtattgcagtccatagcaatggatgagcaaattgaaggtgatgcaatgactcgtcgtagactcgaatggtccattatgttcgaagttaacggttggttatatccaccggtcaaggaagtagccggggaaatccgtactatctatcttgacttctttgcaaattccagagagcttgcaccggagggcaatttcgaatctgttgactcggaagctgttccacgagacgtcgaccaagaagactggcaaggtgaatctgttcaaacatattcgcaggatattcctgtaccggttgacccagcgccgccagccccaagaaaaaatagggtaccactatgagtgaacttgatattaacaaattgatggatataacagacctccccggaattgccggggaggaagttactgcatacgaacctcttgtattaaaagaagtcgaaagcaatccaaataaccgtacgccagaccttgaggatgactattctgttgttcgtaaaaacttgcacttccaacagcagatgttgatggatgcaggtaagatattccttgaagcagctaagaacgctgaatcgccacggcatatggaagtctttgcaactcttatggggcaaatgactaccacgaacaaagagctgttaaaacttcataaagaaatgaaagaaatcaccgctgaacaaatcggcacaaaaggtggtacaccatcacagacaaatattgaaaatgcaactattttcatggggtctcctgctgatttgatggatgaggttggtgactcatacgaagctcaggaaagacaagagaaaataattaatggaacagccggttaacgtattaagcgacgaccatccgctgaatataggcgataacattgtaatccgtcctcctggttcattggagacaaaagttgaggacggaatacactggattaaatcgcagtgggatggtaagtggtatccggagaagttcgatgaataccttaaaattaataaaattgtaaaaattccatcgaacgcggataagccagaattatttcaaacctttaaggataagaataacccacgcacccgttataatgcgtttcctaacctgaagcgtgcaaacataaaaattaaatggaccaaggaaatggttcaggagtggaaaaagtgcagggatgatattgtctattttgcagaaacctattgcgcaattactcatattgactatgggacaatcaaagttcagctccgtgattatcagcgagatatgctcgaaatcatgcacaaaaagcgtatgacagtttgtaaccttagccgccagctgggtaaaacaactgttgtagcaatattccttgcgcactttgtatgctttaacaaggacaaagctgttggtattcttgcacacaaaggtagtatgtcagcggaagtgctggaccgtaccaagcaagcgattgaattacttcctgatttccttcagcctggtatttctgaatggaacaaagggaacatcacccttgacaatggttctactatcggtgcgtatgcatcatctcctgatgccgtccgtggtaactcctttgcaatgatttacatcgatgagtgtgcgtttattcctaacttcgttgatgcatggcttgctattcagccggttatctcctctggtcgtcgttctaaaattatcattacgactacaccaaatgggcttaaccacttctatgatatttggactgcagcaattgagaagaagtcaggcttcgaaccttatactgcaatatggaactcggttaaagaacgtctttataacgatgaggatatttttgatgatggttggcaatggtcaaagcagactatcagtgcatctactctcgagcaatttaaccaggaacacggtgctcaattccagggaacttctgggacattaatctccgggatgaagttggcaataatggattggatagaagttatgcctgaaaatgggtatttctatcgatacaaaaggccagaccccgaacgcaaatatattgcatcgcttgactgctcagaaggacgtggacaggattaccacgcattgcacataattgatgtaacagatgaaaaatgggaacaggtggctgttttacattcaaatgaaatatcccacatgatactcccggacatcgtttataaatacctgatggaatataatgaggcgcccgtttacattgagcttaacagcacaggtgtttcagtagctaagtctttatatatggatttagaatatgaaaacgttatttgtgattccatgattgacttagggatgaaacaaacaagaagaacaaagcctgtcggttgttcgacgttaaaagaccttattgaaaaagataaattaaaaattaatcacaaacctactattcttgaattccgaacctttagccaaaacaaattatcgtgggctgctgaagatggttttcatgatgaccttgtgatgagtttagtgatttttgcctggttaacgacccagcaaaaatttgccgattacgttgacaaagaagaccttcgtttagcatctgaagtattcggtcgcgagttggaagacatgaatgatgattatgctcctgttgtattcgttgactccggagacctttccgccgaatatgcacctgcacacggtttatcattcatataaataaagtaaagcaaactattagaggactcaaaatggctttattatccccgggcattgagctcaaagaaacaacggtacaaagcactgttgttcgtaacgcgacgggtcgtgcggcgctggttggtaaattccagtggggcccagctttccaggtaactcaaattacaaacgaagttgaacttgttgatttgtttggtggtccgaataatgaaacagcagattactttatgagtgggatgaacttcctgcaatatggtaacgacctccgtactgtacgtgttgttaaccgtgacgaagctaaaaacgcatcccctattgctggcaatattgaaactaccatcgtaactgctggtacaaactatgctgtcggtgatgttattcaggttaaacacaaccagactgttgttgaaccggctggccgtgtgaccaaggtcgacgttgatggtaaaattcaggcaatctttattcctaccgataagattattgcatttgccaaaactattaaccagtatcctaatttaggtagtgcatggactgcagaagttacgaccacttcttccggtgtatctggtaccattactgttgggaaaattgttaccgattctggcattctgttgactgaagcagaaaacagtgaagaagcaattacttccctggaattccaggcatcactggcaaaatatgcaatgccgggtgttgttgctctttacccaggcgaaatcggttcgactctggaagttgaaatcgtatctaaagctgaatttgaaaaaggcgcagctgcaaatctgaatattttcccgggcggcggaacgcgtgcttctgtggctcgtgccgtgtttaactatggccctcagtctgaaaaccaatatgcaattatcgttcgccgcgatggtgcaatcgtcgaaaacgttgttttgtctaccaagcagggcgaaaaagatgtttacggtaataacatttatctggatgactactttgcaaaaggtacttccaactacatctatgcaacatctcgcaactggcctgtaggcttcagtggtatcatcaatctgtctggtggtatttctgcaaacgataagattaccgctggtgatttgatgcaaggttgggacctgtttgctgaccgtgaagcactgcatattaacctgcttatcgctggtgcagtagctggtgaaggtgatgcgactgcttccactgttcagaaacacgtggtttctattgctgacgaacgtcaggattgtctggcatttatttccccgccgaaaggtctgttggttaacgttcctctgacccgtgcagtggataacctgattgactggcgtacaggtgctggcgcatttgatactgataacatgaatatcagcacgacttatgcagcgattgatggcaactataaatatcagtatgataaatataatgacgttaaccgttgggttcctctggcagctgatatggctggtctgtgtgctcgtactgatgacgtttctcagccttggatgtctccggccggttataaccgcggtcagattctgaacgttctgaaattggctgttgaaccacgtcagacccaacgtgaccgcatgtatcaagaagctatcaacccggttgttggtttcgcaggtggtgatggttttgttctgtatggtgataagactgcaactaaagttccatctccgatggaccatattaacgttcgtcgtcttacgaatatgctgaagaaaaatatcggtgatgcatctaaatataaactgtttgagcttaacgataacttcactcgtgcatcattccgtatggaaacttctcaatacttggatggtattcgtgcacttggtggcatttatgaaggtcgtgtagtttgtgatactactaacaacaccccgtcggtcatagaccgaaatgagtttgttgctagcatttattttaaacctgcacgcagcatcaactacatcactcttaacttcgtagccactagcactggtgctgattttgatgagctgattgggccacaataattatcatcgcttagaatgaattaatcagttagaaaccgtagaaccattatacagtggtataaataaaagcataatcggttctacgggctcctgtggttgattctgggaagccattatcttgagatgatgaatcatattacctagtataaatacatgcatcagggacgcgttcgcgcgacctgtgtctataaagaggattccttaatggagttgaccgatatcacacgcgctttcgaatccggcgactttgctcgccctaacctgttcgaagtcgaaatcccattcctgggtaaaaactttgctttccattgtaaagcagccccgatgcctgctggcattgtagaaaaagttcctgtcggttacatgaaccgtaaaatcaacgttgcgggcgaccgtacatttgatgactggactattacgatttataacgacgatgctcataaagttcgtcaagcaattgttgattggcaaaacctgtgtcacggtatgactaacgaaatcaccggtgcagctcctgctgattataagaaaactgctactgtccgccagttccatcgtgatggcaagaccgttacgaaagaagttgttattaccggcatgtggccaaccaacgttggggaagtccagatggattgggacagtaacaacgaaattgaaacgttcgaagcaacgtttgcaattgactggtgggaataagtataaataaagttattatgaggcttcggcctcatttcccaaacttcggagactctaatggcaggttttaacacaatactaaattttcttaagccttgggctaaagaagatgaacaagaatataagcaacaagaaaaaaataatttagagtcaatgaccgggccgaagtttgacgatggggctcgcgaaattgagtcacaagaacaaaacgtcccgtataatgcattgatgcaacagatgttcgggagtaatgaacctgaagtaaaaaataccagggaattaattgacacataccgcaacttactaaataattatgaagttgataacgcggtgcaagaaattgtgtctgatgctatcgtttttgaagacggtaaagatgttgtagctcttaaccttgatgctaccgaatttagtcagaaaattaaagaccgaatcctcgaagaattcacggaagttaataacctcctcaatttcgagcgtaaaggttctgaccactttaaacgttggtatgtggattctcgaattttcttccacaaaattatcaacccagcaaaacttaaagatggagttcaagaacttcgtcgccttgacccaagacaaatccagttcatccgtgaaatcgttacacgcatggaaaatggcacaaaaattgtcgacggttacagagaatattttgtatacgatactggccatgaaagttattgtgccgatggtcgtatatatgaagcaggtactaaaataaaaattcctcgtgcggcgattgtatatgcgcattctggattactcgattgctgtggcaagaatatcatcggatacttacaacgagcaattaaacctgcaaaccaattaaaactattagaagatgctttagtcatttatcgtataactcgtgccccagaccgccgagtcttttatatcgatactgggaatatgccgtctcgtaaagcagcagcacacatgcaacatattatgaatacgatgaaaaaccgtgtcgtatatgatgcaaccacgggtaaaatcaaaaaccaacagcacaacatgtctatgaccgaagactattggttgcaacgtcgtgatggtaaagcagtcaccgaagttgatactctcccaggcgcgcaaggcatgtcggatatggacgatgttcgctggtttaagaacaacctatatcaggctctccgaattccattatctcgtatccctaatgaccaaaacagcggcgttatgtttgatgcgggcgcgacaattactcgcgatgaattgaatttctctaaatggattaggcagctacagaataaatttgaagaagttttcctcgacccgcttaaaaccaaccttatcctgaaaaaaattatttcagaagaggaatgggaaaaggaactaaataatattaaagttacgttcaaccgtgatagctatttcaccgaaatgaaagacgcagaaatcatggaacgcagaatcaatatgctaacgatggctgaaccgtttatcggtaaatatatttcgcatcaaacggctatgaaggacttcctccagatgtctgatgaagaaattaatcaagaagctaagcaaattgaattggagtccaaagaggctcgtttccaaaaccctgaagaagaagaagaggatttctaatggatgatttatttgaagccattaaatcaaacgacctcgtagccgttcgcaaatattttgctgaaaacattggcccagtatgcggtagtttgattgaagaacgtaagattgaaattgcacgttccatcatgattgaaggcgaagagcctaaagaagatgatgaagacggtaaagcagaaaagaaagacaaaaaagaatctgatgacgctgacgaaggcgacgatgatgaagatgatgaggacgatgaataatgtttattatccctgatgattacgaattaactcttgaaaacattgaaagtgtttccgaagaagctcagggacaatttgattcattatctgaagctttagaaaaagacgatataaatattattgtagaaaacatgtttgcagctggtgaatatgaaaaagcaacggttatcggcgcgctgaatgaaggtgttcagcttaacgaatttatcgttaaacatgtatcgtctcgcggtgagttaacccgcacaaaagacctagctactcgtaagcgtaatgctttccaaacaactggtctttctaaagctaaacgtcgtcaaattgcccgtctggctactaaaacaaaaagagcaaacccatctacgcaaatcagagcagagcgcaagcgcaaaaaagctcgagctaagcgtaaagcattcggacttgattaatggaacagaaaccagagttactaatcgaacactggggtcaaccgggcgaaattaaagatggtgtaccgatgttggaatctcatgatggttccagcaccggtttaaagccaggactttatattgaaggtattttcctacaagctgaagttgttaaccgtaataaacgactttatcctaaacatattttggaaaaagccgttgctgattatatgacagaacaggttgctactaaacaagctttaggagaattaaatcatccgccccgtgctaacgtcgaccctatgcaagccgctattattattgaagatatgtggtggaaaggtaatgatgtatatggccgcgcgcgtattatcgaaggcgaccatggcccaggtgataaacttgctgcaaatataagagcaggttggattccaggtgtatctagtcgtggacttggttccttgactaaatcagcaaaaggttatagcatcgttaatgaaggttttaaattgacggttggagtagatgcagtatgggggccaagtgctccggacgcttgggtcaaaccaaagcagattacagaatcacaaacggcagttgccgataccagtgccgatgacgcctttatggctctcgcagaggctttaaagacgttataaataaatgtatatcttaacaacaggactacaaaatgcttaaagaacaactcatttctgaagctcagaatatcgatgcttccgttgctctcgatagtattttcgaatcagttaatttgtccccggaagcgaaagctaccttcggcactgtattcgaagctaccgtcaagcaacacgccatcaaactggcagaatctcacattcacgccatcgctgaaaaagctgaagaagaagtcgaaaagaataaagaagaagccgacgaaaaagcagagaaaaaactgaaagaatctgccgctaaattcctggaccacgttgctaaagaatggctcgctgaaaataaactggctgtcgaccgtggcattaaagctgacctgttcgaatccatgttcaccggcatgaaagaactgttcgttgagcacaacgttgttgttccagaagaatctgtcgatgttgttgcagaaatgcaggaagaactggctgaacagaaagaagaaaccgctaatctgttcgaagaagttgctaagcgtgatgcttatatcaattatgtccaacgtgaagttgcgttgactgaagcgactaaagacctgactgaatctcaaaaagaaaaagttggttctctggtagaaggcatggaatactctgatgcattcggtaccaaaattggcgctatcgttgaaatggttaaaggtcaggtagaacccaccaacaaaccaatcaccgaagccgctataaataaaaatgtagacgatgctgcggcactgaattacatttcagaagcagttgaagaaaaaggcgccaagcctaccctgtccttcgcggacttgtctgctctcgcagcatcacgaatttcttaatttaataaggttatacaacacatgaaaaagaatgcattagttcaaaaatggtccgctctgctggaaaacgaagctcttccggaaatcgttggtgcttctaaacaagctatcatcgctaaaatctttgaaaaccaggaacaagatattctgaccgctcctgaataccgtgacgaaaaaatctccgaagcatttggttctttcctgaccgaagctgaaatcggtggtgaccatggttatgatgctaccaatatcgctgctggccagacctctggtgcagtaactcagattgggccggcagttatgggtatggttcgtcgtgctatcccgcatctgattgcgtttgatatttgtggcgtacagcctctgaacaacccgactggccaggtatttgccctgcgtgcagtttacggtaaagaccctgtagctgctggtgctaaagaagctttccacccgatgtatgctccaaatgctatgttctctggtcagggcgctgctgaagctttcgaagctctggctgcaagcaaagttcttaccgttggtaaaatttattctcacttcttcgaagcaaccggtgccgcgcacttccaggctgttgaagctgtaaccgttgatgctgctgctactgatgccgctaaacttgacgccgaagttaccaaactgctcgaagctggtaagctggccgaaatcgctgaaggtatggctacctctatcgccgaattgcaggaaggcttcaacggttctactgataacccgtggaacgaaatgggcttccgtatcgataaacaagttatcgaagctaaatctcgtcagctgaaagcaagttactccatcgaactggcacaggacctgcgcgctgttcacggtatggatgctgatgccgaattgagtggtattctggctaccgaaattatgttggaaatcaaccgcgaagttatcgattggattaactactccgcacaggttggtaaatctggtatgaccaacaccgttggcgctaaagctggtgtgtttgacttccaggacccgattgatatccgtggcgctcgttgggctggtgaaagcttcaaagctttactgttccagattgataaagaagccgctgaaatcgctcgtcagactggccgtggtgcaggtaacttcatcatcgcttcccgtaacgtagttaacgtactggctgcagttgatacctccgtatcttatgctgctcagggtctgggtaaaggtttcaacgttgacaccactaaagctgtgttcgctggtgttctgggtggcaaataccgtgtatacatcgaccagtatgctcgtgcagactatttcaccatcggttacaaaggcgctaacgaaatggatgctggtatctactacgcaccatatgttgcactgaccccgctgcgtggctctgacccgaaaaacttccagccggttatgggcttcaaaacccgttacggtatcggtattaacccgttcgctgacccggtagctcaggctccgactaagcgcattcagaacggcatgccagacatcgttaacagcctcggcttgaacggttacttccgccgcgtatatgttaaaggaatttaatcctagattaagttaaataaaaagggacccttgaggtccctttcttgttttcataccataccatttaaatgaacttctacccggcgcttgatgaggtctctgaagttaacattgttttcttgaagtttcaaccagttaccatttttatctttagtgtgagtagaataattaccattccaccagaaatcagtgtcatatgctaagttttcatattttttaactagtttgttcagagcattaccattaacaccatttgggtatttgttgaccaatgcaataacttcaatttccaattttttaaaggtgttcagaaggaaagttgctttgttcatttttaaactccaggttttgtttgttaactcagtatggaatcattatgtcttatcttaatctggttgtaaacaacttttataaataaagtatatcacaaaaggaaagcgcaaatggcaaagattaacaaattactgcgcgagtcaactattactaccagcaactccttgggccgcccgaatcttgttgctttgacccgcgctacgactaaattgatttaccgcgatatcatcgctgaacaacgtactaaccaacctgttgctgcactgtatggtgttaaatatcttactcctgataacgaattcagtttccagacgggcgctacttatggaggtgaagtcggttctaaagaccgtacaactattccagaattagctacagccactcagcctgttgctaaaggcgaatatgtaaaataccaaaatatcgtttacaaagctctggttgataatccatttgcatcgaccacagaaacagtgttatctgatgttctgcaagaaggtcttattgcatcgactattcgtttagttcctgatgctgcacacaccgaaaaattcgaagctggtgatgttgaaattagcaatgctgtattccaggttaataaatggaatgctccggttaaaacacgtaaattgaaaactgcattaactgttgaacttgctcaggatatggaagcaaatggttttaacgctcctgcattcttggaagacctgcttgccactattatggcagatgaaattaacaaagatgttcttcagtctcttattaccgtttccaagcgttataaagtaactggtgtttctgacaatggcaccatcgatttaacatacgatgcagccccagaaggtgcacgtaaactgtacgaactggtttgcgaaatgaactccgaaattcagaaaactacatcttattccggtacctttgttgttgcctctagccgtgttgctgctatgttggccggttctggttggttgaaacacaggccagaagacgaacagtggctccccgaaacagcgtacggttatttgattaatggcctccctgtattctgtgatgttaacagtccattggattatgtaactgttggtgttaaagaaaattacggcggaaacgaagtcgtaggctcaattttctatgctccttataccgaaggcctggacttggatgatgaagagcacgttggtgcgtttaaggtcattgtggacccagacagcttgcagccatctatctctctgatggttcgttacgcactttcagctaacccgtacaccgttgctaaagacgataaagaagctcgtattatcgatgcaaccaatatggatttaatggccggtcagagcaatatgtcttatctgctcggtgttaaacttccgccaatcatttatgaggcgtaaatgcaaaagattaatgcactaattcacgaatcaacattaacggcggccaaccaggtcgcccgtcctaatttgctttcttatacccaggctacgaataaacgaatttttaaagcactcgtggccgaacagaaaactacccagcctgttgcagccctgtatggtgttcgtgttctgaacccagatgataaaatgacttatctcggtggagcaacatttgcaggtcagattggtatgttcgagcgtaagaatattccagaatttacaaacaaagacgaagcttatgcagtcggcgatatgttccagtttgaaagtgttgtgttcaaagttttggaagcatccccattcgccggtacactcgaaactgatttaggtgaagttatttctgaagccattgctgctgggcatataagaatgatgtcagatgctgctttcactgataaatttgaaaaggggcatcctgaaattgctgaagctggttttcgtatcgataaatggcagactgaagttaaatccagaaagttgaaaacttctttaactgtcgagcttgcccaggacctggaagcaaacggttttgatgcaacagacttcatcgataatattctcggcattcaaatggcagaggaaattaataaggatgtactgcaatctcttattactgttagttcccgtttcaaggtgcaaggtgtttctgaaaaaggtgtattgaatcttactgacccgaaatatgataacgcacaggaccgcgcacgaaccctgtattattatatgtgtgaaatgaattctgcagttcaacgtcagacttcgtttgctggtacatatgcagttgcttcttcccgttgtgcagctattttagccgcttctggctgggttgagaaaaaggaagaccaggatgaattggcctatggtgttctgaagaacggtttgcctctttacgctgatatgaatagtccatgcgattatgttattgttggtgtaaatgcagatatgggtgaaggtcagacggtcgcatctttatattatgcgccttatacggaaggacttagcgaagttgatgatgagggggatacctcggttggggaattcaaggttattgttgaccctgaaagcttacagcctacggttgcactgttagctcgttatgctttgactgcaaacccttacaccgttgctaaagatgataaagaagctcgccttattgatggagctgatatggataagatggctaaccaaagccaattgagttcttatcttggcgttaaacttccaccgctggaaaaagaataagggccttgcggcccttttttattcactaattaatgcaatccatacatgtcttaatgtttcttttacatttgcgataagttgctttttaacttcaacaggattttctgtctgggttaattcaagtccttcacgacccgcttcttccaggatatcctgaacagtcaaacccattaccttcccaaaatccttcggcgatacttccccaatcttactgataacattgttaatacggttgacagtcacataatcagtaaacttccataaaacatccaggtcttcctgggacaacacaacagcagccttaataggcttatcagactttttcttttcgctgaatttagagttcttacatttaatcgctacacgctcgccgttaggtaaccatgcaggaacatcaggttttaatacaaatccttcagcagtgaatactttaccttccacctttgcatcaaaatcagtggtatttgctgtagtcaatcctgcgttatccactgtaaaattgtaatcagggaccacagaatccaggtcattagggagcttaatcaagtcttcaaagcttccggtagccaggcgcggagcaactttaaacttatgaataatacaaaaggcttccatcagtgtgtcagtcaggacggattcagttccatcttctttagtaacgcgaatatcaaacacataaaaatctttatcaccgtaatccacattcttctggatacctgccccggcaaactcaccataaatctgatatgcctggtaattaatatcctgcaaaagtttctgcacagatttaatagaatctgcgtagttctttaatacaatttcataaccatagaaatcttctgcaggtaggataggtccagtgcgtttcgcgcatgtcacattgtcttgttcaatgattaatgaaaagttggtaccatgaattttctcacgagctacccattcaccgctggtgaagccttgcaggcgaatcttttcaatgaacttgttattatagtgattttcaaggctgttgtatttcttaaacataatctctcacttttgatgttataaatatcattataaattagacccgctatactttctttctttgaaaggaattaatagtcacaaagggtctagaaccattataccgcatttttatttgaagcaaaaagggtcagaattttacatacagcattggcttggattcttgccaatcataattccaggtaaaagatgtaaatttttctgctcgcagaaattcagatatctttgcgcggtttccttcttcatactctttttcagaaactgccatattaacagcatctttgccgttctcggcggcggcaatagccactttgcgaaatatagaaataaagtcatttgcaactttatcttgtgactctttggctatttggcgtagttcttctgcgaatgtcatttcttcacctttttgttattcaaacgtttacgataaacaatcttttctttcgctttaaatttagctttggcttgttctacatcaacccaggcctttgccatctctttagcagtcccgcctaataccttggcgatttcaataaatgtcataccagattcatgcagaaaatgtactttaaccttatccataatgattctcatgttgagttagtgaagctatcttaacatggaatttttaacttgtaaacatgatttttatgccagatgaacaattgcatggtatggtcacaaagactcactagagaagggtccaggtaacatttgcccagtaccataaaaataaagggaccaaaggtccctttttaattaataaacgtaatcgtatataataccagtttctaaagcggtgcgatgaataactcgaccattacgagattcttgtacatcaacctctggatagtcggtaatcattttttgaagtgtgtatcggtgcaaataatacgggctatccgggtcatcagttttccagtcttggccggcaagagtcattttctgaatttcatccataacccaccaaccacaccagatataagctgaattacgtactggcaatgggtgaatatatggtaattcgccatctggaactggtgcgactttagccgtgactgttacattaccagttttggtaacggttacagggttataatctgtagcagatacaacaacagaaacttcaattaactgggaaccttcggcgcttgtatcgattgctaaagtatccgtggtaccagcgactggtgaaccatctttcttccaagaataggcaaaagtagcaccagcaggcgcaccggctacagtagctttaaaagaagccggagttccttcaggaacattaatagaggtcggtgctaaagtaacagaaacacccgacatagttttcttaacaaaagttaccgcagctcctttagatgcggtgccattattataatcgggtgcagaaacagtaacttcacagttcaatgtataatttgcttctgctgattcggtgacggtaatagttttaccagtttgacctgcgattacgctagtgttacgtttccaaacgtaagcgattgttgcaccagaaggagcgcctgtcacgttagcagtaacaacttgagattgccccacttctttagtaacagaggcagggtctaaagtcaatgtaatagcaggcattgttttattctggatagttaaagttgtctcagcctcagcagtttccggttcaccgtctgccggagtggtagttgcaacaactttaatagtcttactgcctgctgggccaacagcgacataagtcattgctgcagtcacagaagattgaggaacgccatcaacggtccatacaaatgattcaacaccttcagctgcagcgccagacccggttgcagtgaaattggttgttgctccaataacggccgtagccgccaaaggagcaatagctacggtataagccataataaacccttattttaaagtgacaaaagatgagttacgagtttctcgtactagaacagacccattacgattgatgtaataaatcaaactgaatagggtttgatgcgcggtgggatgtgggaaagcagttggacgttctttccaatccggagtctcagaaatccactgataaatccaccatggaacagtacagaatccagggttcttgccaataagcataagatttggactaaagttttttggtagagcaaatacaggtttttcagattcgataaccttagcaacagctgcttcgaacttttcttcgataaaaggaacatcttcttcgaccaaaacaactggttcttcgatttcaacaacttcaacctttgcttcggttagagcatcaaataagagtttagcttcttctttagctgactcatcgccatcaaatttagcacctgacaattcatcgtcagcatcaataaggtcggtgatgctcaggccttcattatcatcaggcataggcatgtcagcaaatgctttaagtcctgcttccaggtcagccaacatattatcaaaggtttttgttttcttaacatcaacgccaagtgatgctgcgtattcggctaatttttctttggcttcttttttctcgaggacacgaatttcctcaatgtagttcttgtcaatcatgatgaacctcggttagtgtataaatatagatatatttattaccttggaatcatcatggatattaaaatcaactttctaaattttagtcacgtgcatgttgaatgtgaagatggaatcttctacgaactccgtgattacttcagcttcgaagctgaaaactatcgcttcaatccaaaattcaagcagggagtttgggacggacgaatccgcctcctggattacaatcgtaaattaccatacggtttggttaatcaaattaaaaagttcgctgaccagtttggctattcattctggattgacccacaaatcaccgagaaagaagaaatctctcgcgaagaattcgacaaatgggtcgagtcaaaagaaatctattcaggcaatactaagataacgccccattggtatcaatctgacgccgtatatgatggtctggtcaacagaagaaagattctgaacttacctacgtctgcgggtaaaagcctcatccaggcgcttctggcgcgatattatctcgagaactatgaaggcaaggtgcttatccttgttcctacaaccgcgcttgttgaccagatgattaatgactttgttgattatcggcttttccctcgtgaagcttgtctgggtattcgttccgggactaaacgcgattctgatgcgatgatttatgtatcgacttatcagacggctgtaaaacaacctaaagaatggtttgaacagttcggccagtttatgaatgacgaatgtcacatggctacaggtaaatcaatttcgacggttatcgaaggccttacgaattgtatgtttaaatttggtctgtcaggctcactccgtgacggcaaagccaaccttatgcaatatatgggtctgtttggtgatatctttaaaccagtatcaacatctaaattgatggaagacggtcaggtcaccgaccttaaaataaatagtattttccttcgttatcctgatgaatttaccgttaaaatgaaaggtaaaacttatcaggatgaaattaaggtaattacaaaagctacacgccgaaataaatgggtaacaaatcttgctctcaagcttgctaaaaaagatgaaaacgtctttttgatgtttaagaatatcgagcatggcaaatcgatgtttgaaatgcttaaggaagctggtcatgagaaagcgtattatgtttccggggaagttgataccgaaacccgtaatgctctgaaggtcatggcagagaatggaaaaggaattatcgttgtagcttcatatggtgtattctcgacggggatttccgttaaaaacctccatcacattattttcgcccacccggtcaagtcaaaggtaattgtacttcagacaattggtcgtgtacttcgaaaacatgaatctaaatcgaccgcaaacgtgtgggacattgtggatgatatgggggtcaaacccaaatcagcaaacgctaaaaagaaatatgttcatattaactttgcgcttaaacatgcattagaacgtattcagcggtatgcagacgaacaattcaattatgtaattaaacaggtggaaatataatgaaatcctttgaagaaattatgtacgaagcatcaattgaaggctttatggctaagattggttcctgtcagaccatggacggtctgaaggagttggaaggctattataaaaaacgcagcaaagaagctgaactaaaagattccgatgatatcagtgttcgtgatgctcttgccggtaaacgcgccgagcttgaggatatggacgaagacgaagacgaagacgaagatttctaaataaaaaggccccaaccaaaaggaaggggcaaaaccaaaaaatggttaacaacactagctaaattaaaagttgggtctcgttcagttgctcttctgtattttccgtaactggcaaactctgaacataattataacaggcgcccggatgcaccggaccttggtctgtatccacaaccaatgcagaatcgattggagttttacagacaacacaaatcttatctgacatgattgtctcctcagttaaacttacatatctatttagtgctcttcataatagcagcacgagctttcatctcattaacaatttcagttattcggtttgcagagataaccatctcgtcgagaatcttactaatatttttcatttaattttccttaaagtatctcataccagtatctatccccatattgtgagaatagaacgcatcatcgatgtatcctgcaaatttacctttaacatagataacatcttcaccgcaagggtggtcagcgcagatacgaatatctgcacgattcaatttccattccttcatcatatacttaatttcttcttcgaactcttcgtcttggttaaacgcatcgtcgatagaatatcgcattatttgcctgcctcgaattgtcttatttctaacatatgtttaagtgcgaaacttcgcgacttaacaccatctaatgcagcgctacagaagtcctggagtagtgcccaatactgaattgaagtatcaatcttcagtatgtttgaatctgctgccatgactgttttcaattccgacttctcgtatacatccatgcatacttcttcccctgggtcacctcttcccgtataatggtctagtcgttttttcagtgcagttttcttctgaatctcaagacgcattatttctttcttgcagttggtatacaatctcaaccatttgctatgcaacaaaacgttgttttgtgtttcatattgaagttgcgtaccatcaatttttaaatctgcatctaactcatcctgaaagacttctaacttatattcaatctctgttttcataatgtatccaatgtaagggtctagaaccattatacagccataaaattaaagcattaaccgttttgacttaactgaatcctaatttgttcgagggtatcagggtcatcaacaatgctgaactgaaccgttacgataatggagttatcatcatacatagggacaactgcaacctgtagattacttattcttggttcgaagttccgcaccgcggagacgatgttgcgtttaatggtatctgtaattaacggtgtgatattctcaaaaagctgattacttatatcacatccaaattcgggcataaaaggccgtgacccttttcttgtggtgattattcccagaagactgttcttaacagaccttgcaccagttactttagcaacgtctttatcccaacttgtagataagttgggagatacatcgctatacattttgtttatattcatttacataaacttaaagaattctttaagccccttaattacatggacagaatgcgctccgcactcgcaagagataggaatagccatttggacctgtggcttgagaagttcttcggttagtgcatttatatcatcgagggtaattgcgttgtataggtcctcgatttcggcttcatttaagtcatcaacaacgatgcgctcgccaccttccgtgataatatattcgatacaacaagcaatcattttacctttatcgccgtcttcaaacaacccaggataacggaatttaattttaaatgccccgaaatcacgaataacttcagactcatccacgatgcttgcacgacttatagtcacaggaatatcttgttcctttccacattcgcatacccatgtatgttcgacattaacaaccccaagactatttgcccagagaataataagaagcagctcagcttcctgtttgtttaaccctttagcatcagtgcatttattaagcagttcaattattgcaggttccatacgcttttctaattttgcctgaagcaaatctttgtattcgcgcaatgtaaaagccctacaatttatagttttatttttaatttggacaataaattcataagtcataatttgctcctttactgtatttataaatatcaataaagataaaaggggattctatggccaatatcgtaagatgtgaaatgccagacggagttcatcgtttcaaaccgtttacagtcgctgattaccgtgatttactgcttgtgcgaaacgacatgaacaacaaacccgtcgaagaacaaaaacaattattagacgaactgttggaagattattttggagagtatccaaaagcatggaggccttacatattcctgaaggtattcacttcctctatcggtaagacaaaagtcccggtagcgtttgaatgtcaaaaatgtaaaaagacaaagcagactttgtttaatatgagtcaaggtccattgacaaatccaacaatggaaaccgcggggataaaaatacaatttaagttccctgaagtagaatataaagataagtcggagcttgttctaaacaccatccagactgtcgaagactcagaacaaaaatacaattgggaagaccttcctgaagaaacgaagatgcaggttattgatgcaattgatatagagagtctcgaagagctccttaagaaaatgcattcagtttatattccatttacatatggttgctgcgaaaaacacaaaaccgaatatacagacttgattgatgtctttaagcttatccttaacccggatgaagtctttgtattttatcaaattaaccacttactggtaaagaatcaatatacactggatagcatcatgcacatgattcctatcgaacgaggtattgctttatcgttagttgagaaggacttgaagaaatgacagctaaatctatgcagcgtgaaggctttcctaatatcagtatacgcctttacgaagattatgatgcctggctcgaacaccgttttgtagaactggctgcgacatttacaaccatgaccatgcgtgattccctttacggaagaaacgaaggtctgttgcaattctacgacacaaagaacttacatacaaaaatgaacggtgaacaaattatacaagtctccgttaagaatgccaactcagaccgaacccaatccagaatatatggaagcaaacactttgcagtttctgtggattcaaaaggcgataatataattacaattcagctggctcctattcacgaaattgaagacctgaaatttagtcgtatgttttacccgagtgtacaggaaacattagtcgaaatgaccggggtaatttatcaggatagaccgttgctttctccaccaataaacggcataaacgtttatgctcctaacgttccatggtgtgattcgatgaaccgatatatggaattcataagggaagttggtctggcagtagaaactgataaatttgtttttgtatgggaagatattgatggaataagtatccaggattatgaatggttaacatcacaagagccaattaatttcgtggtgggtgaacctcgattggttggccagtttgtacaaaacctcgagactccattggccttcgattttgaatggttaacaaaggcgaaccaacacacaagaaaaccatacgaaaacgcaaccgtgtatgcacattcattccttgacaagaacgcaaccagaataacttttggggaaggacaaaacagcattctggtatctcgttcaggcggctattcggattatacataccgaaacggtttcgaagaagcgcaacgattaataaccatgtctcaatatgatggttacgcgcattgcaaaacatacgggaactttgaattaaccccgggtgataagataaatttctatgacccgaagaaccaattcaaatatgatttttacgtagacgaagttattcatgaagtgagtaacaatacatcaattacaaacctctatatgtttaccaatggtaagcctattgaagttgaagagccaccaaaggttaaaaatgaacttaaaactgattctgccgacgaagaaaatacagctgggtgataaagagattcacattcctaagctgggtcttaaacatcacaatctgattaaaaacgaacctaacccatacgctgccttaaaaaagattatgcaatcgatattccctaatcttacagcagctgaatccgactttgtatctttacatcttctggaatttaatggtaagctaaaagacaaacgcgagattgatgggtttacatataagctggatgatgtttatatctgtcagcgccttgaattctcttatcaaggaaaaacatttaaattccgctctaataaaccgtatgaagaattcggaccagtagacaatctcctggagaccctttatctcggggaagacgttccagactttctggatatgcctgcttttgttgctaagtgggcagacgatatcacaagcacattagcaatcccgggaccgaatggtcctgttaaggggttactgaaaataatggaactcctaaatgaataagaactccgaacaaacaagcttcagacgcggtggaccgaataaaaagcttattgaagaattagcaccacaaaggagggcggaagccctctctgccgaacagaatgacgaactatcgaatctgaatacaactcttacaaatacacaagctgcaaccgaacttgtgtcggaagctattgaggataagggtaatcagattatcgagaatatccaaaccaataatggagtcctccaggatatcagtgctggggtcgaactgacggccgaagccaccgagaagactcaacaagggattaaaaacctcacggatattctctcggataaactcgacaaactcagtgcaatgataagtggtaaactaggtgtcacgtctcctgtagctggttctgaaagccttaaacctgtggaggatgcattaccagagcctgaagagaataagcccacggcgagcgttccagagctcataccgccagaagaacaaaagccagacgcagacttcattccagaaccagaacaaccaaaaaacgatgcagaaggcaaagagactaatacctggtcacttagcgataagcttgacaccctttcaaagataaccgaaaaaggatttaaggcatcgatttctgttgctgaccgaatctctgggatgttgttcaaatacacaattacggccgctgccgaagcagccaagcttattggtggattattgctgttggtatttggtatcgatgcgatacgagtttattttcaatatttcatgaaacaattcgaaaaaggatgggccgaatttaatgacaagttcaaagaatgggggccattactcgaaggactaatgacttgggctaagaatgctgaagcgatgtttagtgaaaggaactggttgggattagctgaagctattatccgtgggatggttaacttaacgaagaacatggctcaacttcttatgcttgggatttcgaaactgatttcagctatcttaagcaaaatccctgggatgggtgatttagcagataatgtggaagcctcggctttgatgtcttatcagcaaaatacaggggcaactctggatgatgaagaccaaaccaagatagcaaaatatcatgacaaacgttcggctgaagcaatgaaagctgcagagaagatgaataagaagtataaggataagcctgaactaattaatcaagccgaaaaatatggtaaccttaccaaggaacaagctgaccagcttcgcgcgggtggtattgacacaagcttcagagaccttccagaagaagaacgtctggactatttcaagaagcgtgacaaagcacaggctgatattattcgtttgacccaaactgctgacaacctaatgaagccagatgcgaccgataaaaagaatgcgctggaaatgagagctaacattgaaaaacaattagctgaccctgctatggcaaaaggtggagctccgaaagacttgaatatgcgtgctctcctggaaaaacttgataagtctcttgagaagttcaaagatgaaccaaaggttaaaccgccagacattaagacttctccggatgcgcaacaagccgcgaaggttgatgaaggcatgaaggccaaagaaaataaatacaaggatgtaccagctcaggcccaaattaacacggtcaataatattcagaagacttccaggacgcactacaatatgcctccccaaagttcaacccctgcccctggcatgagacaggctacgagaattaactaaggaataatatgaaagtaaaagaactcgatattgatattgcgggtttgtttaacggaggttctaagacctccgcggggcagtcaaaagctgccccgactcaagctactattgtggcgcaatatccagcagaacgagcttccggtaatgattcttcagatgatatgcgagttaatgacctttataaaaatggtctgttattcacggcatacaatttcagttcaagaacatctccggaattacgctcagataggtcaagccaattgacttcattaaagaacgtttcaaatggtgcttcatttaacccggttaaaagtttaacatcttttgctaaatcgaaattaaccggggctggctcaacaggtaaaagttttgattcaaatgctgttgcaaatatcctgttgcctcgttcgaagtctgatgtagaatccgtgtcgcatcgattcaatgatgttggtgaatctcttattacgaaagggggtggctcagccaccggtattcttagtaacatcgcatcgactgcagttttcggcgcactcgaatcagttacaaacggtgtaatggccgaccacggtgaacagatttacacaaccgcacgaagcatgtatgctggcccggacaacaggacaaaagtttatacctgggaaatgactccacgttcggcccaggacttaatccagatagtgaagatatacgagatttttaactattactcctatggggaaacaggtaaaagttcgtttgcttccgagttgaaagataaaatcgacacatggtataaatccaccttcaaaaaagaagcaatcgataactttgatggtaagttactcggtgaagagataacaagcttcctaacgaacgttctggtggtctctaaccctactatctggtatatccgcaacttcggtgatacaagctcgtatgatggtcgtggggagctatttgggccatgccagattcagagcataagatttgataaatctccggatggtcatttcggtggattagctattgctcctaacctgccatcgacttttgtacttgaaatcactttccgtgaaatcattacgcttaaccgtggctcgttatatgcggagggtttctaatgtttactttacaagaattccaaacgcaggcgattaatatcgacttacaaaggaataacctttttagtgtggtcttcgcgaccacaccttcctccaaatctcagaatcttctggaccagtttggtggcgcattattcagcaaccttcctgttaactcagattggtttggtttaacgcaaggcgacttaactcaagggataacaactcttgttactgctgggacacaaaagcttattcgcaaatcagggataagcaaatatcttatcggggcaatgagtaaccgtgttgtgcaatcattattgggggaattcgaggttggtacttacctgcttgatttctttaatatggcctatccaacggctggtctattggtccactctgttaagcttccggataacacgttgaactacgaaatggacctcaaccataacgcaccaaatatcaagataacaggaagagaatattctccattggtattgagctttagaatggattcagaggcagggaactacagagcatttaacgattgggttaactctgtgcaagacccagttacccagctaagggccttgcctgaagacgttgaagctgatattcaggttaaccttcactcacgtaatggattgccgcatacggttgttatgctaactggttgtgttcctgtaagtgtatcagcgcctgaattgagttatgaaggggataatcagatagctacatttgatgtgacttttgcttatcgcgttatgtcaactggtgcggtgggaagagctgctgcattggaatggttagaagataaggttattaagggtgtatctggtattagttcagataataacttgaacgccgaagttgccaaattgagtcgcttgtctggtgctcaatctggattaacaagtctatacaatacgttcactggttctgggagaacaatctccggtggaagtcaacgtatattataaaaagaaagggacccgaaggtccctttttatttgcggaatgaaatgaaacctgctgcagtcattacagcttctttcttagcaaagactgtaattgcaattggtgcttcagattcaagttgtccagttactacaccattaaaaatattttctgtttgttcagaatttacaaagttttcaacagggcgaaggtcaaacttcttatcttcaccaaatacacggcgcaattcattacccaccgcgctgtcaaactcttctgaagccgggataacattctcaactaccagttcctgaccgttaaagcgaaaagatgatttcattttgttttcctcatgtgtaattgatatgaacattgtatcgcacttccttgtgcttgtaaacccctatgaaaggaatttaggaggaatagcttccaaattaatacaactagcaagaataccaagcccttgattgactttcttcgttaccccagaggatgcaaacgatgcaaagtcaacagattctactggctcttctgtttcctcgccctgataaacgacaagctcaccagtttctatcaacacatcaccatcatagataactgcattttcatccagttggtccgtggtctggatatcagcttccagcattttgacgttcgcgtttccttgatacgaagcatcagtaattttggtaatcttaactacagtcccacgaggaagaataacttcctgctcggatgggttgcttgacaattccccaggaacaattacgttaattaagtccgccccagaaattttccaaccaacatgcatcattacgtggtcgcggcgtgcttccggcatatctggtaaaacaatttcgtcatcagcctggaaagatgtcccatcacgatagtcctgatgaactgcagccatagcaacgttcgccacccagccaccaaagataatcggtttaaacgacgttgatacatagttcctgaaataaaataatttagatttcttaattttatcaaatgtaggaacgtttaaatattgaccacgccaaagagttgtattaggcggcaacttatgtccaatttcaaaggccgaatccaattccttaattgtttcgacaactctgtctagatttaggaattcagcttcttcttcataatatttgcccatcaaataattattaatatcggcatagtttgctccacaataatctgcaattgcttctcgctgaccataatggaaacggttgtcagtataccctgctgtgaaattaagagtattttctgatgcttcttcagcaaagtctttaactgcaacacgaatggcgcttgtgtattctttttcccagagcgaggctgcataagtggctgcatccacattaggaggagcatcattcatttttctttcgataaatgcggctttgcgaaggttaagaatctctgcgcatgattcggcaaaaatctgcatctgcttcatactaccaactggagcacgtttaagttcgcgatgcatacggttaaaaattgggtcagagtcttcaacacgaatttcttctttccaaacaccatttgctcgcatagccgtatctgctgcgcgcatacgagccatagtattcgtttcggaaggtcgaacaaaaatttccagttcttcataatcatcgataagttctgccgtagccggtcgactaaacttagcagcttctgcatcaatttcgtcccaaccttctggcacggaatccattggggcgtactgggcttgtgcaatagctcggcgactgattttagttttctgggcaacagcagcatcggtctttttgtttgctgcgtcaatcagaatctcggctgcaatttcttgtttggatacttgtgcaccattatctttattggtgaatacatcaccaactttagtttcgacttttttatatttctcagggactggtggcataccatcgactgaaagcaggtcaacaccccttttgtacataattacataagcgttctttttaccaaggccagaagcattcggaagaacatgataacgtccgctggttttcatttgaatcagtcgattcataatacgaataatagcttggtcttgtcctttcatctttttggatgggaaacggaacaagactacatcaggtttgcctagtttaatgctttcccagactgtagtaaaaatcaagttaattgcatcaagaggtttttcacctaaaccacccttcagaggaacagcatggccatgtgaagtcccggataacagaaatacctcggcaattgcatcaccgcgtttatattgtttaactgtttctttgcccgtgaattgcatcaaacgggccataagagaattggtcccaggaacaccgaattgccaaacctgtgggaccttgtattttggattcatattaatgacaggataaccgaaggtttcgatatatttgtcaaagagttcatttaattgttcagacataataggttccttataaaatatgatgtatttatactaaaaaagggccgaagcccttttgttattttaatccagtctttgaccagtcgccaaatacatcttcgaatgtgtctgcatggtctttatcaaaacggaaccctttgataatcgacaggaacaatgcaaccgtattatctttacgagtctcggaagtcaaccaaccattgcattcacagtcggcaatcattccaaccaattcacctttacgtgctttaaccatcaaggcttcacggtccatttcatgacgctcctcaatcggaatagtaacccattttttggttttcttatctttgacttgagttgtgtctttaaaaccagaaccacagttatttgtaatcttaccacaagaagaacgaagcaccacaccgccaatcttattcgggtctttatcgtgctcgtaatatccaatgatttccattgcaatgtcaattacttctttgaacttatacaggttctttgagcgcttgttttcccaaatcgatgccatgttcttaaggataataccttcaaggccttcatccacgtatttcttatagataactttcgcttcatcaagattgttaacaacatggttttcaatcagaatcatgcggtcaaaaccatgcagcaccacgttatctgcaatcatcttttccagaacagcaaaacgcacatcgtatttcaacggattgagaatcttaacatcagaatagacttcaatcagcggaacataatcccaaacctggaatttcatacaagaagcttctgctgcagaaatagttcctttcaatgatttgtttgccataccatttgaaaaggttcttgattcagcagtttcttttgcaggagcaatctcatctgaatcgtcaaaaaggaagcccaaaccgtcattctggggagctattttctgttcatggtatactaactcgccatcaattaaaacgccctcaggatgtctctcgcgcgcttcacgagtagcttcaatcaattcctttttaaggaggtcaagcttgaggtactcatttccggctcgggataacaatcgaacatcatccaactcatcgccgcgaacttctgcaaaacaccgagcgccatcggctttcaattgtgcaaaggccgggaacttaatgttcttagcaataccagcttcatcataagaagaagcgagcatctgcggttgttcaggaattaaacctttccaaaccttattcgcaattgatacagatgcaccacattccaggtcacgcatcatcacacgccgcaagacttcaacatcggcctttttaccatctgcaatataaccagataattcctcgattgccgcattacctgttaatttgcgagaggctaatgtgaattcgataaagtcaagcatatcatcgatattcaacataccaaagctttgagtcgttgccccaggttttggccatttctttatatagaactggatgcctttggaatatgtcaaacgatacacgcgtttaagggtttcattatcagaatacgattctaagatagcttgtttctctttagtagaatcggttgcagcaatttcatttaaaatatctaaaatcattaatcacctcttagtcgttgactctattatatgccacgtcttccaaaagcaaatccagccgcttatgataagtgaacacaaatttagttgccccgtctggtttcattttggtcatgaagtgaatatagataaatccttgctcaacgcattcacgccaaacggggttatctttagccggattaatatcaaacgagtaattatgattcacatgacgaataaactgattaacatgaccgtaatccatcgtggtagttggaccatggtcagaaatagtatgaacgacaaacatcaattacccccttggccaccggtcggttgattgtaccagtattcaataccagtacctacacgctggccatattgatatggatatgctggattatatccaggagtccacggttgaccaggctgccagccttgctgcatttgttgttgaaggcgtcgagtttcacgaaacagctcttccagtttacggagttcatctggagtgaattctggtttgactggttcatctttgtgtttcagtttaagctgtccagcaacatcgtcccaattaaaaactttggaagctgttttaggaatagcatcacgttcgccgcgggccatccaataaaccggaacctcaagaatttcactcgcatggtcgcaatggtgtgcaaggtcatcaatataacaaatgacattatatttgtcttttgccttctgaaacaaatcctctttagaggctgtatggccacacatcatcacttctttaaacgctccagggaacaaagcattcaggttaaattgacgattcaagcgtgcgtcaatggaatcacccagggctgtaacagccacaaaatcatattgctctttgaggttattgataacccttaatgcatccgcataaggagacaaatagcgaataaagtctgaacagttatatttttcaattaactgcgcgcctaactcttcatcacaattgaaaagtttaccaggggtcacaaatttttcgtcctgaatcatcttaaggatatgttccaggggtaaattatatttttgagcgaaataaggtaagccagactgccatgacaaacatacgccatcaatatctgttaaaataacgggtttcataatgcatctctcaattggttaagtatgtcaataaattcttgttcagtcaatattgtatcatgaacagtaaggtggctcgccatcgaatgctttaaaactttgccttttgtggattgtaacgcattgcggaatccttggttctggagcgctgcttcaaaatatgcatttgtatacagctctttccatgctgcagagtatcttgaaaagggaattccaagccagaaaagcgtcccacggtccgcagctcttgcataagctcttccactttgctgggcggccaatccggacatcccaaatatacgtttttgttgttcatgatttctcaccttgcacccttgtaggaagccttcaagacctccaaactggataccctccataacaaaaggccatttagcaaagttacttaatgcacatgatggccatgggaaattgcttctgatttctaactcagacatttttgacactgataatctctacatcagcccaatgaccataaccaggtaaacggtctttaatagataatccgccgtcagatttcagcattttaattgttttagtatatggttcaatatttcgggcccatggacttacgtcagtcacgcgataagtaacttcaaccatttctgttcccaaaattttctgaatcagtttcttaaacatattatcctcgctttaaacatttgattacagacaactcaccacccatgcgaacgtcttcagttccatcaacccacaagactgcatatgcttctttaatttgggtattgcctaatttaaacgcaggcaggacctttgaaatcattccaggaatacccacaccttttaactgaacagtttgtgataagaataatttcattagaacctcatctggaaaccgtgtgatttaacattaccgccattaatatcagatgaattaatttcacgtgctgcaattggggcaatatcaatgtcgcgtctaagcttggtgattgccagagtatcgcgtccattaacagtccggaattctagtgggcaaactacatcaacatagttcttaatggaatcacgtgttggttcacacccagcaggaacattagggccttttttagagaaaacaacttcacagaaatttttacgtgtatcaaagtaagtagtcataaacatagtattttcctcaaggggctttcgcccccatttaagattagatatcaaattcattaagaactacatcaaagattgcttccaggtgttcaggttttgctttgttgctcaggatgtgacgaatccaagttttaaccagaagcttgcgattaacaccattccagcaaggatgagtccctaaatcacgttcacggaaatcatcatctaatgcgattttgaataccgaaccttccatcgtgattgaaagagtgataccattttcaaatcgcatataaacgtagttaggagtcatatattgttcaatttcacacactgaaccgttttgatgtttccacaagcaaataacttcagaagaacctgggatgcagttagaaacatatttgcgttcaaagttgatgtagttcattttattctccagttgttttcatttgttggtacaggtctataatatcataacctgtaccaaagtaaactgttttatgcgactttaatccaattatctaaatttaattcacctttagctttcattttttcaatcagaaggtctgcagtggtgcgaccattttgataccatgtaacatcttcagaataaccagtttcttcatcttcataggtcttacaacgaatcttacccaaaatcaaagttttcagttcgtaggtatcaccagtaaaaaagtttgttaccataattttccaggagaagtcatcagaaggaccttcaggagtcatacaaccaacaaattcaaactgttctttatacaagtgccattgcatttctttagtttcaatggctttgtaaccgtcgtggtctttacctttgatgtatgagttaagattgattttcattttattctccagtgttttattgtgtaactcagtatggaatcattatgcactgggcaaatcctgttgtaaacccctttatggaaaataaaaaagggactccgaagagtccctgaacttatgctttcggcttaccaaagcaagctgcatcggcgcgcaataccgcacgagcacgagcctgaagtttatcagtcacctgattgattcgcttgttggacgcacgcttgtaaccagcgcgtttggaggagccatcaacaactttaacttctttcttagccatattaaattctctttaaaatagaagcaggacttattggcattgcctgcgcaagccctcgaagggaacattaggtttcggatatttaacgacaggataaccataaacctcgtcatcataccttatagctcttatctgttgcacaccgttagcttaaaggttccgggttcgatttctcgaggataagatatatactgatggatatataggccttgaggcgtactcccgattggccatcacctcggggtagcatgcacttgccgctataagaataacattcaagaggtacaccgtaaaactgccggggtcttaaaactataatgattcgcaaatcattaatcagacggttcgacggctcctcgattttctagccgcactaaggtagcgaatcacctacagcttacttcagggttacgacaaaatggcgaacagctttacgggcagcagatgccagcggcttagcaaatttcagttcatcttttgcttcgagcactgcgcgaaggtcggtttgaaccgggttaagatgtttgaaatactgcagaatttccagtgcttcggcttcaacatcaatagatgcgccgtagttttcgtgaccgttattccatgcagtgcgttgcagttcgagagcgtgttgtaattgtttgtttaaagacattttagaagcctcaatatgaggtgaatatttggtggacacgttcttctgaatttcacttcctttcggcaagtctctcagttgtagtccaccgtttaggattagctaaccccatacaccagcaaagctctgtatgacatcaaccaatccatattattatttataacgctaattttacttataaagacaaggaacagctttataatgacaggtcacaaatttctgcttaacttctttagcctgcttaagtcccagtgcaaccagaggatgtggaacgtttgcaatcttgccaaccggaagaggagtcaaatcacctacttcgcagaatccttcaggaacatccggaccaaccgaaaatacttcacacatctccgggatttcaccctgatggagttttccgataacgatacctgatgccgtagtttcttcatcaccagcttgctttggctcagaaaccaaaataatatattcacctactgctttaattggtaattccatatttaatccatgttgtttggtcatgtattaataataacatgcattgtttgaagcattaaaggactagcaaagtctcggtctgcagtccattcacggaaatcaatttattgaaacagaatgaacgccattcattaagcttggtatcaaatacccggatatagctaactggttctttattgacttctggtccaggggcctggatttctttatacggaagcaggtccaggtcgcgagtacaagtcatacgacggatgctaccatctgctttttcaaacagaacttcatgaaagccgacagacaagatagtcttgactttttcgcgaaggcgaattgtttcttgttcagttaaaatcataattattccaaaacagttttaatagtggttgcattacgctcttttagagcactcagcagggatttacatttttcaaaaaccgggtccgttttataccggatgctttcgtcaatccattcggatttatagtaagacttccagcgagagaagaaatactttttgtattccaccgaaaaagagattatacccgtcccccgaggactaaggctggttattttaaccatacgaaatttcattattcaccacaaaattcgttaatgttttcccagttcaatttgtctagactacgcttaggcacattgaacacctcaattcccgcgttcttcaggatatcatcccaaccaggaatattcttatcatacgtttcacagtaaaccaatttcttgattcctgattgagaaattgcctttgcacagtcaggacaaggggaaagcgtcacatacatagtagcgccttcaattgacgaacccatccttgctgcaaacagaattgcattaagctcagcatggatttcgttgttctttgaccaggcagaatgggcttcgcgatgggctttcgccaatacaaaacggtcaacattactgaatctcacacattctggcttgtgaccggggacgagaacgggtttaggtttattcagtaaccaaccttgctcttccgcatgctcgcaacagttgaccccacctgcaggggaaccattataccctgtagaaataatgcgcccattcttttcaataacagctcccactttccaggagcaacatttggattcttgagatacaaggtatgcgatttgcagaacagtagttggtttcatttacatcaccacgagataattggttttaatagtttcaacacgatataattcatgtcgcaatttagtaatgctcttaacatgtgttgtaattatactatcaccgtcgctgaagcgttttttcttatcgtcaaaaatcaccccaaacattcgctcaccaatttctacaggagcttctgtgataacaaccgcatcataattacttgggtgaatacttttaaacagagcatcattcgcaagcgttactttgataaatgcagttgtttctgggtccaacttacgatggtcacctaaatcatttttaagtgattctttgaaaatatccattaaattcatcattgaatatacactcgctgcgcttcaaccagaccatcagaacccaattttagttgggtcaactggtcaccaccttttagagtaattttaggattaatgacaatcataaaactgcgtgcagattcctgaataacttgcaaagtcgcggcagggaatcgctgtgatacgcggttaatcatctcttgagcaaatgccttcactttttcgtgaaactcttcaacagtaattggggtttcgctaagcatcagattgtctcctgtttaacttgtttaacgatagaaacttttgcgatatcgcctttgataatatagcaatcttctgcagtaccacggtttaacagacgctcggcttcgccttccgcatattcttttgacacatgacgagagttaatctcaatcttgccatttttaaccacaagcaatttccaaactgatgcaagttttactggcacaggttcaacttctggcttaacaccaacttccgcctggatgaaataatcaaattcatctgacaatggaccagcggaaacaaacattgctccacgatgcctattctgtgcgccagatatttttgccaaatccacaaaatcattttcatcaatcaaacgaatctcacaaacttttttaccgccgctaacagtatcaggtaaaatcttaacttcaaacggagtcataccgatgtatccagcaatttggtaattagctgcccaaccaccggagacaaattgttttttggcattttcagatacaaatttgtaaaacttaccttcttcaaagaaattactcattttgttttcctcatgtgtcgatgaaattcattatacaccatccgtggtgaaagtaaacacttaaattgcttctgcaattgcagtttgattctggaagtcaaccttgcacgaaacggtcaaagtggctccatcaattttaaacggaacaattgcgaatgctgcaccagacgtgagtttgacagtgattgcatcaactgcatccgggaacatgatttccagaatagcagacaaacgaccgtgcacctttagttcagtcgacacgtcgacgctttcgtatagataatcagatacaatctgactaaaaactactttaacaatttcagaatacgtaggaaacatttcttttctcgcttagttattggggttatccaaaggacctagacccattataacataaaatttttaaagcgttaatggacggtatgcaccttgacattaacgatgaatcggtcaatgacttcagtcagcggaacgaattcaacataatattcgcccttgtatcgttcgttgatatcattacgcagtgcagccaggttgttgataagagcaggagacatattctgccctaccagtttctgaagctctttataagcttcttcttcaacttcatggtgtttgttatacataatgttcttccaagaaggccaagagttctggagcggatttaaagataccgccatcaaccttgtcttcatctttatagtccattacatccaggccaatacgtccatcggttaaaggccacacgccgaagaaaaagcatttacgtttttcaatttcttcgattgtacgaaaaatcttttcgatattattcattaaaagtcaccgtgagctacttgccagcattcaacaccaatatgacgccacatctcaacgacttgactgcggtcgtcgacggctaatttcacatcataatgtggtgcaattttgttccagaagatttcttccttcacaatatcatctttacggtcgtcaccttgctcgcgctggatatgagtttcccaaggaatttcatacttatccatccaggctttggtggcttcataatattccgttggattttctttagtaccagattcacggccagatactgtaataatactataccctgcgtgatgaagcattttcaggtactgaacaaccattttgtttggtgcatcagtagacagttttgcaagctcaaatggtccacgagctacgtgcagagctaatgttccatccaggtcaaagataatggcttttggttgaccaggagttcctttataaaccggaagaccaaggaaggtacgcatatgaccatacatggaacgaagaacatcaattggtaccgcttttggaccacggcgattgttgcgtttaaccagttcagtccaaggaacatcaaatactttatattcaactttccaattgtattctttagcaaaggtttcccatgccagacgacgttcaggattcaagttggtgtctgaaataattacacccttaacagaatcaccgccatacaaaatacccttcgctgcatcaaactgcatacaggtaacgatgccttctttcttcttggagtatttgtattcatcacgggcttcatgacccataatggattgacgataatcatctcggttgatattaaagaacccggggttcttagcgatgaattcacgagcccaagtgctcttaccagaaccaggacaacctacagtcagaataattcttttcatcatttaattcctaacagagttttaagaagctgaatacgcaattcaacacgcccttcatttaattcagctactgccttgttgcttgacttgcggcgagtattggcagagatgaacataattaaatgattctttagctcacccatatccaccccttgagcttttgccgctttacgtagagctttgcctgcatcatctaaggcttttgcagggtcttcatcattcaataccaacccgcggtccaaatccaaatatacagcgccgcgacatgaatcaatataattgtctgaacacttgatgtaattctctaataactctttcatacaccaagctccttataaagttcttcgcggcaggttttaaggattttaccagtttcataagctgcactttcagaaacatcaccaagtgcagcggcagattgcatttgaccatggcgtttagctgcatattcaaaactttttactagctcacgaatacgttctttttcattgtactcttcaatgaattcagggtattcccaaactgggcgcatcatacgataccactgttggatggtaatataattacttccatccagattaataatttgcgaaggcttaatagcgcccggggcataaaaagttacctgtcttactacatcaataccgtccacaatagcccaagcaaaatcgaaagttgccttcttttcaattggtgtacttgcacaggaccctaattttaagagcttttgtaatgcaggggatttaacacctgaaatgtattcaggattagctacaaaagaattgtcacgtaaagtcatagtcatttcctcaaattttataatccgtaggagcattatactctgctcccatgagtttgtacactactttccaaaaagaccttgaacacataaagtggccgcaattccaaaacaaaaacagaatgcaccaaatctaacaatatcccaaccaaggctacaggtctctatcatttgcaacgttcctcttttagttcagaacgataataacataacatacctttttggtcacgtacatatctttttacatcattcatccaaatcctgaattcttgcgatgcttcaaaaggcataccaacccaggcttggccctcaattaccttcacttcccattgctgtttgtaatcagccaatgcaacaggccaattaggatgaacttggattgtgggctccacaacgggcttctgggcacatgaaacgagtccaatagccaaacatactgccatgatagatttcatcatttggtgagctcctggaagtcctgggcgaacttatcaaaagactgattaatctgtttttcaactaatttaggcttcgctgccacaaccttagtacgttttgcatctgcacgaagtttatcattttccttctgtaagtgttcaacatattcctggcgctgttggtcaaggagattaatttgattaacctggtcttttattgattgcagatttttcgcattatcttctgcgactttggtgacttccgccaccgctgtcttgagattatccacttttgcttttagatagaaaccactaccagcagttactaccagggcgagcataagccctgcagtgagattacttatttgcataacttgatgattacctcaacaatatcatcctgggataaaccattcaggaggatgtgatttgtactgtcagatgctgaaatgcggaactgattaccaacttcatccgccatatcatcctgggttaacactgggtgtttaattcccaggcggtgttgaagtgtcaggggttcaaccacaacataacaaacacatccattgatatgcacattaggttgggtctgattgatgaacacttctgcatcatatttaaccaaatggttctttaagaagtcaaccatttcaggaacagattcatgcagtgcttctttccgctcttctgattttttatcgcggtattctttttgtttcgctttcaactttttattggaggcgagttttttccgcaagtcagtcatgagaccaattttcttggtccctttatagacataaattccgtcatgacggtcaccatattcattgacaatcatttcatttgaaatcagttgcatatccataatattttcctcattagtagcggttataaccccggggaccaaaagagttggcacccaggcgctcatctttctttttggctcttgctctaaacccagaatcacctgtttgagctttcagttcttttaacaatttggccttcaggtcagtaatgaaaccaatccggcggtctcccttgtagacatagattccatcatttctgtcaccatatgcctgtgtaactctttcatttgtaattaagtttaacatgttttagtcctcatcagtagttgatggaaccattatgtatagaaaggaggggcttgtacaccccttttttattattcaggaaggattacttccgcttggtagtccgacggaatgtaaagtttatgatttttaaggaaaactttattgatttgagcaatcgtttgttcagtttcctgtgggcgttgataggtgttcattaatacggagaacaatcccgggtacggtttgcacaactcttgacctttaatcgcgaactcgcgacggtctttccctgctaactgtttctgggcatcaagcaacaatccaagagtgttggacagataatccagatgcgttacagtaaaggcattaactttttcgcgagcatatgtatcgccagtaaacatggcaataacatcatcagcgccgccagcaacaacaacttcaaacagacgctcattattattaatggagtctttagtatgatgtagagcacaataccattctgttttcatcttgaacttctgaccgttagccagctcatagacgaagccttcaatctctttcataccacgaacattctcaatgctcgccgggtcatatgcttcaaccaggaaaggacggagcgcagcatctttgaacagttcctgataaggaatatattcaccagtttcattatggcgaacgttcagtaaaatcaggtcacgttcctggtaaggcaaaacaatgcggttggttggtgcaacatattccatattgcatgtataaccagcttcagtgatttcagttacgcgagccctgaatgcactgcgatgctcttgtttaaacacctgcaaggattcagcggcctgtgagcttttgattgaccctttggatttaaaggcgatattagtctggtccatataagtagaaaccaaactaccatcagcttttgcagtaaccaggacaacctcatcaaggttaaggtccatggtcattggattctcacccagattaaagaatttttccataggccgggcggcaatgcgaactggaccattgtcatccatttcaaacataatgccacggcactccagcgcatcatcaagaagccaatcactataggaagcatagttatagctaaagatgcggaacttagtttcaaatggagaaacaaaatccgtatagaaaaacttacctttatcggattcggcgcaaagcttcattaagttatcatataattcaatcatttcttcaccttatgttggtaattccacgggggattaaaaagcttgatgaacatcggctcttccagagacatcgtttcgactgacattgtgccaagttcattggtcattgacagattgaaacattgtcgtgcatagaatatcacctttttaccttcttgtaaagcttcatgtatcatccgggatttgtttgaatcactcgtctgttcgattcggttaattgcagtccggtaatagttgatacgcttcttaaggttgttcgtcttaccaatatacactagttcatcatcaactgaaatagcatagataacatttttcttgtttgcgagagtaaggatagggattttaccatcgactaactctaactccgcgtattttataaaactgtattcatcagcgatttgtttcatgggcaaaaagggccgaagccctttccttatagatatttacggaaaccagcaagaacattctcatcgacgtcattgtcaatctgggctaccaggtaagcagacaactcaacttcttgtggcgcagattgcacattatcagagttaagatattcacgaatccatggaatcgggtgcttagtagattctaacacgatttcacaagggagaccgcattgcttcatacgagaaactgtcaaataatcgatgaaccggttaagaatctcgacgctcaacccggggagtccaccatctttaaacagatgcacggcccattctttttcctggcggttaacttccatgaaaatggctgcggcttctgcttcacattcgtgtgcgattttaacccattcgtcaccgtctacaccagtttgcagctgacgaagaatatattgtgtccccttaaggtgaagctgttcatcacgggcgatgaacttcattattttcgcattaccttccatgatttccatgttcttatggaagttgaaagtacatgcaaaagatacataaaaacgaatagcttccagtgcgttaataacatgcaggcagagataaagagacttcatcaatgctcgtttggcgatagcttcttgtttgatagctcgttccaaacgttcgtccgcttcgggagtttctttggccagttcaacaaaagcaatctggttttgccattgacgagttttattcagaacatcatcatagtaatgaccaatggattctgcgcgcttcatgattgcatcatctaacaggatttcgtcgaataccttcgccgggtccgtatagagatttcgcattatgtgcgtataagaacgagagtgaattgtctcgctgaatgtccaggtctgaatccatgtatcaagactcgggtcagaaactaatgcggctaatgctgcagctggagcacgaccctgaatactatccagaagtgattggtatttcaggttatttgtaaaaatattttgctgatggacaggaagcttattaaattgagctccgtccatcatcaggtttacttcctctgggcgccagaagaatgataattgcttttctgttaattcttcgaaaactttatgacgctggatatcataacgtgcgatgcccaatccagaaccgaagaacatcggctcggctaaaacatccactggagtggtattaaaaactgtactcattttatttcctcaatagctcatccatgagcataattatatcaaagtttacaggcggagcagtcttctgctttaggagcttcgatttcgtaatcgtctgttccggaaccatctctagtgttatgataataaaggttttttccaccaaaataccagaagtacatcaggtcgtcaagcataactgacatcggaacttttcctttcggataattctgcgggtcataatacgtatttgctgatgctgactgacaaatccatttcaacataatcgcgacttgggtcagataaggtttgttaccttgcttagctagcacccatgcgtaatcgtacaatcctttattgtgctcaatattgggcacgacttgattaaaggaaccctcttttgactctttaatagagactggcccacgcggaggttcgataccgtttgtactgttagaaacttgggaagatgactcacaaggcataagtgctgataatgtgctattacggatgccatgttcaaccaggtcttcccgcaactgcgcccagtcacaaacgtagtttggagctgcgatttggtcaatctttttattgtaccagtcgataggtaattcgcctcgagcccaacgagtgtctgaataatattcgcaaggtcctttttctttggcgagcttgattgatgctcggataaggccatattgtaatctctcgaacagttcatgcgttaaatcgtttgcatcagcgtaggaagcgaaattgcttgccaaccatgcagcatagttagtaaccccaacacccaggttgcggcgttttttggctttcagagcttctttaaccggataaccctggtagtccaacaggttatcaagagcacgaacctgaacttcagccagctcgttaatcttatcttggtcctgccagtcaaaactatccagaacaaatgcagagagggtgcacaatccgatttcagcgtcttcgctgttcacatcagtagtcgggattgcaatttcacaacaaaggttcgattgacgaatcggagccttatcgcggatgaacggagtatagtcattcacgttatcaacgaactgtggataaaccctggctgtaccggaacgttcggtcatgaataattcgaacaggtcttttgctttgatgcgcttcttacgaactgtcgggtctttttccaaggcttcgtataactcacggaatttatccgggttatcaaaatatgaataatacaattcaccaccggcttcgtgcggactaaacagagtgatgtaatcattcttagccagtcgttccatcatcaggttattcaactggacaccatagtccatatgtctgatgcggttttcttcaacacccttgttattctttagaacgagtaaattttcaacttccaaatgccaaataggataataagcagtagcagcgccgccacggattccaccttgtgaacatgatttaacagccgtttggaaatgtttccagaacggaataacaccagtatgcttgacttcgcccataccgattttagaaccttcagcacgaatcatgccaacgttgataccgatacctgcacgcttactgatatattcgatgattgaattagcagtcttattgattgacttcagggagtccgccgcttcgataaccacacaggaactgaactgcctggtaggtgttctggcgcccgccatgataggtgtgggcaacgaaacctgacgtgtggatactgcatcataaaaacggcaaacgtgcttcagacggtccgttggttcatcctggtgcagtgccatgccgatagccatgatagcgaattgcggagtctcgtaaattttaccggtggttttatctttaaccaggtatttctctttcaactgcatcgcgcctgcataagtcaggtcaaaatcacgttcgtgcttgatacgagattccagataagtaatctcttcggcagaataacttgataacagttccgggtcatatttgccttcattgacacaataagaaatctggtcaataaaagaacgcggttcgaactggccataaacatctttacgcagagcaaacatcgtagccttcgctgcaacgtattggtaatctggttcttcaaccgagataagcccagcagacactttgatgataaccgtctgaatatcgcgggtagtcataccatcgcgcagatgtggtttgattgtttcgtataattcatacgggtcgatattagttccttcgcatgaccaggaaagaactttaataattttctggccatcaaaatcttgagagacgccactacttttttgtacttgcatgttttcctctatagttcaaaagggttgggaaccttaaattgtctctggcagttccgaagacatttcatcattatattcttcttctgactggacggtgatgtcaaaatatgactggacgtcaccggctgcatcatgacagtagacacgttcatgacgtttggccagaaatttgattccgtcaatagtgatataagaatttggtgccggtaaatcctgttcggtaaattgtatcatttcaaaaatgacttcgccagtctggcgtttaaatcgtaaattcataatttcctctcattaaattttaaataattatatcacagtgccctgaagcggaatcgtatttatgttcccaaatcctcgagcgaaaaggtgtctttgaaaagtttattaacgaccagggcgataacatcaccatgacatgactttggtttgcatgtacaggctaatcgcattccgcggagggtttcaaggtgttctcttttaatttcacccgatttaatctttgatatgaaatattctttaaagttctttatgttttcttctcgggtaccatctttatatgggtttccccacatggtaccccgttgaatattcacatcaaagtcagattgatatttgttaacaacccgacatgctttcatagtaggaagttaagtccgaccattacgaccagaaataaaataccggcaatttgaattttcattagacctcgacaataaaccagatagaccgattgaaatcatcatattcatacgatttaaccacacgcataacataaagttctttgttctggacaaaaatcgttgttttctctttaggcagttcatcgagacttatgttcattttttcaaacagcacctcattggtaccgtatctattgtttactatacgaatattcattagaccgccatcggtgctgcgattgtaggatgtggctcatagttttccagaacaaaatcacccggagacatgtgacgagtcacccaatataactgcatttccgtgtcccactgctggaattgctctggccaattaattttcaaattcggaagagtcttaggttcacgacgaagaacttctttgcattgctcgatatggttaagatagatatgcgtgttgccacccatgaatactaacttaccaggcttgagtccagtcattttagcgacgatatgtaaaagcgtaccataagaaccaatgtcaaacggaagcccaaggaatacatcaaccgaacgctgataccataacaagtcaagctcaccatcgtgtacgttaaattggtagagcagatgacaaggaggcaaagccatttgtttcagttcagccgggttccatgcggacacaatctgacgacggtcggtcggaactttcttaaccttttcgatggtctcaaccagctggtcaaccccaccaaaatcgcgccactgtttaccatatactggacccagttcgccatcaacataacctaatgcacgaccttgagcttcaaagttctggtcccagatagtctttttatcagagccagcaccatgagtaatttcacgaagacgttcaacgttcgtagaaccttccaggaaccacagaagctcaccaaccacagatttgtatgccaaacgtttaacggtcgttgctgggaagccttcagacatgtcccactcaactttggtgccaaatgtcgcgatagtaccagtccctgtgcggtcgtcagtctgatagccaatgtcaaatacagtttgaatcaagtcttgataatttttcatttatatacagtctctgtaatatgggttacttcatctattttataccaatgggtttcaagcatttcacgtttgcttatatcatacaggaagtcattatccaactgtactgttgagtttacgcgatgctttttataaattttggtcatgacaatttcatcagcatacggtgcagcggcttccaacaatgatttgccaccaataacacagatataattttctgaagaaataagcatttgagcaggagcatctggcgcggatatagaaattttttcaccagaaactaatttcaaataattagcccacgtgatataaccacctgccaactcaccagcctttgtaactggatacggtcgcgctgggtcagccacaacgacgtgaaagcgcccctttaatatagacggcaggctttcaaaggtttttgctcccatgagcacgatagagtcttctgtgcgagccttgaagttctgtaggtcctttttgatatgaccccatggcagaccatcatcaagcccaaatgcattttcatcacgaccatcaactgttttagttggagcataagcaaatactaatttaatcattttaattccttagttgcctttttgatggcagtaaaatctttgcgaatatcaagaaccaatttataaagatgtttaattatatctgtatcaaaatatgataccgcacaacgagaattgcgaatatcttctaatgaatacttgctttcacttgtaccatatccaatgataccactaatgcacttgtcattaagcgtatatttctgtggaccatcaataatatttttaggatagatgtaaaggctccaatcaaatttttgttcaagcgtattaaccttaacttcaagaatcagttcaggatgtgcatcatctttagcaaagcaagtgtattcagtaagcattatattttcctcaaattcatttaaatcaagactatgcaatttttaaagcattgcataatagaattcatcattcataaactcaaatacaaaaattatattatctcccatcgaaaagggtcaggagcatatccgatagagttaatcattttaactaaagttaccattcctttgttaactgcttgtgcgatttcatcaaaaacttcatcgctatcatcataaaggtcattaaaaagttctaacacgttcttctgaacttttaatttatgaccaacaatctcgcctacagtaaattcgtttccgccgattccagtgtaaaacgtaattacaccagttaacagactttcgcgagaatctaggtcatgtgataaattaatataagccatcccgggtgcagttttaagttggcaacgaattcttacttgggtaattccggttacatgaatgtcggacatattattttcctcaaacagactttttcacaattttccagtcagctttaaattggtcaacatcagagtggtgaatccagaaaccagatgagctaccatcttcataaagagggcaaccatcacactcatctttccaacccattgcacacaaagtttcttcagctttttccagagcttctggattgttaccctggattgtgaagtaccatttacctttaacttctgaatctttgatgctctcacgttgtaatttcattttattctcctcaagttggtaaggctatagtatcattaccatagcctgttgtaaacatttatttttggattaagcccatataaaattcagcatcttcaacatgcataccatcacaatactcgtcagtcataaaacgagtaaggtcttcaagaggaccttggatttcaatttggatactgaagaattgggtatctttaatataagtcatactcaaagaaggataacgattacggataacttcgtaagtgtattcaaaatcaacaatatcaatattaactttagccattttattttcctcactcattagttgataggtctataataacataatcatagacattatacactactttttaaattttgtcgagccatttaccaagtttggtcatttctttggtagctttttccagacttctgaacttgactaacaaaggataagtatctacacccataactaaagtggttacaagactatgctcgcctacaagccatagagaatacgtttgaacatcaagtccgtaatttcggtctttatggacacgtacacccatcacttcaaactgttcgctggctttttctactgcatccaggaaatcatctttagtcatattaaattccaaaggtagctttaatcaaggcaatgacttcagcagcatttttgtgattaacctgcacatgaatggtttgcgtgtcaacaacaggagcatcttcatcaacttccaggaagtggcggaattcccattcagcgagttcaaagtactcatcagcatcatccatactatccaagatggtaccatctttcatttcaactttttcaacaaaataatcgccatcaataaagcacatatccaggactttgaaggaactgccatgctgttccatcagcttgaccatgcgcgaattatcatcaggactaccagcgatgaaatgttttttagcagcagggtctaatacgtaagttttaccagtttccattttgatttcctcggttgtttatcgtgtaactcagtatggaatcattatgccttagctcaaaggacttgtacactactttttgaaaataaaaaagggacccgaaggtccccttatattaaaggccagccagaaggtcgtcaagaccatcatcagaaggctctggagtgcttggagcagtcgcagtgcgttcagacttagcaggtttactggaagtgaaatcttccatatctttatcaaaatcgtccaggtcagcgcccagtttatcagcttgtgcagcagctttagaagcagcaccgccgagagcagccgtacccattactttagagaatttcttctgattctcttcaagggatttaaacaccagcaattcattcaggtcagacatttcgtcccaaagttttttctggaatgcttcatcattgataccagcgatttcggactggttcatgaatttggaatcatcgtagtttttataaccggaaaccagtttagatttcagtacaaagtttgcaccttcaaaaggacaagttacgtcaatagctgtttcgcccatgtcaacatcgacttcaaccatctggttaattttgtccatgattttcttgccgaagcgatatttgaatacttggccttcgttagacggaacagcagggtctttaatgaccaggatgttagcccagtaagaagtattacgcttcagtttacgatattcggattcgtttgtattgtacaggtcattcttattcatgtacgcacacacagggcagttttcatagtcaccgtgagtggaagtacagttttcaatataccattgacccgcatttttaaagccgtggttaacgagcttaatgaacggagatggattttcttcattcttagaaggcaggaaacgaataaccgcagagccgacgccatcagtatctttcagtttccattcttttttatcgtcagaagagaaaccagaaccacctttcagagcgttaagggaagcagccaggtcagcagggtttttacgtttaaacatagacatatgattttccttagattatttgatttttagcagttgttttgattacgtattaattatacttcaaagtgtttgaagcgttatttgacagtttttaacggtctcaatgaacaatttacgagcttcaagagaatcgatatttaagattttcttataggcatttagtttggttgaatacttttcccaaaccaagtcgttagtctgttcatcatgtttatttataatatctaaaaatgaatcaagcaaacaaaacgtttcaaatgagataacattcgattggagaagtttgaaaatataacttgtgttcactttagtgttatactcgaaaatctcttgaagcgatttgacttcgactttcttactgaagtaatagatattctttatatcatcttcgtatacttgtttaattcttttaagtctgccaatgtattctcgataaaatatcagagcatcagcatcacttatatcacctatccatgcatcctggttcgcaaccaggtttgacatgaatattaacgttaattctttgagagtgtacttatcactaagcttttcgaaaaaatacttatcgcgacgtttttgataagcactatcggagattcgcatggtccagttatatttgataatatcataacgacccgaaaaatgctgtttgatggataagtacagttgatatactgatttaccatttatgtatcggttgttatttggaggcatgcgaatcgtaatcataacaaaaagtccagcgtattagttttctgtgtacgagacatactcggacgaagcaggttatcatcataggcttcgttcataatcttatcaatgattcccgcaggaatgtatcgcgcaaaattaccttcaggaattccacgttcttccaaccaggcagtcgcagcttccagataagacatttcagttgactcaaccatggcttcaatatcaagcccgttttgctgcttactaatcgccccggaaggcgattcagttttctgtgtatcaaaattaactaaagaggacatcatagagctccacagcttcggttttttcatcttcaaaacgttcacgagtgcctttatgatacaggccgagctgtgtattgaacatcttaccgtcaacgcctaattcagtttttgccttatctttaaggtctttaatttcgtctgcatatgcttccatttttaatttggtatcggaagcagctttaatcagcttggctagctcagcaccatgagtatcaggacaaaattcaactttcacttttttctctttcataatataccttaataaaattcagcaatgtttgcagttagtttagacagaccagacttaacaaagtaaggataaactttacttttggctgggataacgtagttattatatcgttctaagattgaagcagatatttccgttgggataaagtccatatcaatcaacaattggttttcacagaatctattatattgctcttctgttaaaagcgttttcagcacgtcatggtcgtaatagttgagtgcaatttgttcaagctcagctgcgcgggtcggcggagtacgttcaccttcttcacgagtgtaataaaaatcaccgcgaaccttgatgcttgacacgttatcttttttgtcacctttaacaacctttgtcacgcaatccataagagcatcgcctgatttagttttgacatattttttctgcatcggtgaccattgtttcaccccagggaatttatgtaactgggtaaagtcgccatccgaagaaacaatcataaccggatgcccgagaccagtgagcaatttcgttaatactgcaatatggtcgtcagcctcaattttatccatattcatcacgatgtaaggcatatgtttttccatttcatcaatgataatgtgcatggcagcatgtaggccttcccaatcaaattgtgactcttcacgagcttttgcacggtttttcttataataataagatttcgtgcgtcgccaataaccattcttcgaattatcaacacaaataatcggaatcgtataaccgagcttcttgaactgcacaatattttttcggatggagttcagaaccaagtgtctggtcattgcagttgttactttcggaaagcctgcgtctttgccgaattcctggaaggcagcagccatgataagctgactaaaatcgagtaactgaaaaccttctttttgacggtcttcttcagggagtaaaaaatctaaattcatatgaacctctgttcaattaattgactcgattatattagcataaaaattttaaagcaatataaatacacatataccaatcaataaggataaagcacatggccgatattttaaaaccagcattcagagcaacatccggtctcgatgctgctggtgagaaagtcattaatgtcgcaaaagctgattactcagttttatcagacggcgttaacgtaggtttctttatagaagaaaacacagttcaacaatatgatgcaacacgcggatacaaaaagaactttgcagttattaatgataaccgtatttgggttgctcaacgtgatattccggcaccagctggagcatttacccctcagtattggttagcaactcgtactgacccgaaatgggaaactgttgcatctccaactcgtcagcttagctccggggaatttatcgcagtcgactcagctgcaagctttaccacatttacattgcctccgaacccgactgatggtgataccatcgttattaaagatatcggcggtaataccggttataatgaaattaaaatccagtcaagcaacgtgcctggccaaggtaaccaaaagattgttcgctttggtaatcagtattcagaagttttaattaccaaaccattctcttataacatgcttatcttttcaaaccgcttatggcaattttgggaagcaggtaacgaagaacgtggtatcagagtagaaccgtcgaccggacgtttccatgcacaagctggcgactttattatgcgtcgttatacaactggtgcaccgattactttcattcttcctaagtatgcaaaccagggtgatattgtcaaatctgttgatatcgatggcatggggccaacgttccacctgatggttgaaacctttgacaccagttccagtcttggtaaagctggccagcatcaaatggaattccgtaccacaggtgatggtttcttcgtttataatgctgccgaaaaactctggtatgtttgggacggtgattttaaaactcgtcttcgcgttattcgcgacagcgttaaacttttaccaaacgaaagtgtcattgtatttggcgaagataactcaactccagcaacgattaatatcgatttgccaactaatgttttgcaaggcgacattgttaaaattgcattgaactatctccgtaaatcacagactgttaatataagagctgctgttggcgataagattgcaactgacattaaattactgcaattccctaaacgttccgagtatccaccagatacaacttgggtgctggttgattcattgacctttaatggcaacatcagttatactccggttattgaattatcatatgcagaagatacagtgtctggaacaagttattgggttgtcgctcagaacgtcccgactgtcgaacgagttgactcattaaatgattccacgcgtgcacgtcttggtgttattgctctggcaaaccagactcaggcaaacgttgaccatgaaaataacccagaaaaagaactcgcaattacccctcagactttagccaaccgtgttgctaaagagaaccaacgaggcattgccagaatcgcaacgactgcccaagtaaatcagaacagtgattttgcatttgttgatgatgtaattatttctccgaaaaaactcaatgaacgtacggcaacagaaacgagacgtggactcgcagaactcgccacacagcaagaaaccgatgcgggtgtagatgataccacaattataactccaaagaaactgcaagctcgccagggctcagaatcgctatccggtattgtaacttacgtttcaacgactggtgcaactcctgctgcttcgcgtgaattaaatggtacaaacgtttataataaaaatacggttaatctggttgtttctccgaaagctcttgaccagtacaaagctacttacactcaacaaggtgcggttattcttgcggttgaaagtgaagtaatcgctggtacttctcaatctggctgggcaaacgcagtcgttactccagaaatgttgcatcgcaaaactgctcttgattcccgtatcggtttaatcgagattgctactcaggttgaaacagatgcaggaaccgattataccagagctgtgactcctaaaacgttaaatgaccgtaaagcatcagaaacgttaaccggcatagccgagattgctacgcaatcagaatttgatactggaactgatgatactcgtatctcaactccattaaaaattaaaaatagatttaataatactgctcgtacttctgttaatgcattaagtggtttagtagaaacagggacgctctgggaccattatagcctgaatattcttgaagcaaatgaaactcaacgtggtacagcaagattagcgactcagggtgaagtcaatacaggcactgacgataaaacaatcgttactccgcttaaattgatgtcgaaaaaagccactgaaaacgccgaaggtattgttcgcatcgcgacaaacacagaagcaacagcaggcacatcaaaagtcttggccattagtccgtctgcgctgaaatatattgcccaaacggaaacaacttgggaagcatctgaaacactgcgtggatttgttcgtttatcttccggtgcagctacttcggccgcaactacaacgacgggcgcgggatttacatatgaaaatggtgtgtataccccggacccaagtaaactggttagctatgcgaaatctggatatgcagtttcgccttacgaattaaaccgcatattgcaaaacttcttaccgataaatgcgatggctgttaatgctgaaaaactggataacctcgattcgacccagtttattcgtcgtgatattgctcagaccgttgaaggcgtattaacccttactaagcagacaaatatctctgctccggttgtatcgacgagcactgcggtgtttactgatgtaacggctggtacttcgacgttcggaactgtgaatgttgttaatggaactaacaagtggaaaatcactgctccttccaccggaacgacaatgactattggtgatacgactaacgtattgacattaaacaccgcctcgggtaatgctgcagtattgaacaaccttagcgccggaaatgatgttcaagccaaaaataattacgttctaaatggtcgtactatcgcaaccacgacgggtgaagtttctggtgcaactttgtctctgggtgataactcacagaatttagtgctcaaaactcttgatgctggtaatatcatagcaaatggtggcggtgcatttaaagttctgaccgagaaaaacgcagtagaaattgttgatagaaactttgttaaccaggctggtgatacaatgtctggtgtactccgtgtgaatgctccagtccgtgtattcggtacgaaaccaagtcttatcgcacaagctccgactgcggatactgttggtttctggtctgtcgatatcaatgatgaaccgacttatagccagttccctggttattggacaatgaagttaaaacgtcaagtaaacattgatacggttcaaactaaacctgctggggtaactgatgaagtttggaatgcttctggttggttaactgaaaacggaacttttgcctcgcccgctattcgttatcgtactgatgatggtacactcggtgatgaagtattaggtagctccggacagaaactgcgcggaacctggtttgactattcagttcgtgataaacaaattaaatatcctggtacattgactcagtttggtaatacgctggattcgtgctatcaagattgggtttgttatccaactggattgaacggtggtactattcgttatactcgtacatggcagaaaaataaatcagcatggacgactttcgcaatggtttataccgcggataaccctccgtctgcagaggatgttggcgcattaccggctgacaacacaacgatggggaacttaaccattcttgattggttgcgtatcggtaacgtgcgtatcatcccagacccgaccactaaatccgttaagtttgaatggattgaataagaggtaatatggaaaaatttatggcagagtttggacaaggatacgtccaaacgccagttatatcagaaaataatgccgttaaatttaaaatgagtatagcagggagctgtactctttccacggtgaaatcgtatatcaaatttcaggatgaacgaattggaccaactacttttggtaatggtctgactctattggaaattgatacaactacgaataaaattgttaacacgaaaaactattcattaactagcacacatgatgcaatcagtcaggcattaatcacctttgtggaatctgttccagccggaagattgattgcttttatttcttcagggaaactaaacgcatcacagccattaattgattggttccgtaaatgtggttcaagagcattcccagataaatggctgattgataaagttgatacatcgtactcggctttttacataaccggccggaatgtaattgtttcggagcatgttaagtataatgacgggaagttagttgaggatgtttcgactccgcttgaagtcatttatgatacctttagtgatataggagcaacaggctatcctgtacgcataacggaagacgagagcacgtattcatcaacaggtgatggaacatcaaccacaattaaaaggttccccacagaggacctggtgactcctatggacacctataaccttttacctttggatgtgctttacttgaagtttcagatgtcatttgacgctgcactgaaagctgcggggaccgtaaggacttcggttcgattctttaaaagccccagcacttcgccgatatcaaatacaaacatcgatatcgcagcaaacgttcctgccggggcttgggcgagtttcgaaagatatgtcgagattccgccaggagctgatggctttacagtagtaacatcaagaactgtagctaccggaactgggtcaatacgcaatattgttattggtgagataaccagaggtgactctgcgttcaaaccggctgaatttggtgtcaacggcataaggatgtcatatgcaaacgatgcaacaaatacaggcaatacaattgtaacattcccggatgcgcaagctccaagagccggcaagatatacgcagccgaactacgagaaaaacaataggactcttcggagtccttttttcgttataaatacaaaatatcatatgccggttgaagaggacttataaatggcagatttaaaactaggctcaacagccggaggttcggtcctctggcaccagggtaatttcccattaacaccagtcagtaatgacttatatttcaaaacttataaaatttattccgaatataacaagccacaagcagtcgataacgattttgtttctaaagctctgggtggtaattataaagcaaatgtgtatttcgaacagggtctgacatttaacgattcaaatggttacgggattaagttaggagcaagaacaggcggaacaccatttacagcatctttccgtattaaaggaccattcggatttgagactgaaacgggaacaccatttgttatttttgaccctgatactacgacaggagcaaaacgtcttactgttatgggtgatacgttagctcgacaaatttatgatgaaacaggtcgtgtattttctccagggaatactccgtcaaaagctcaagttggtcttggtaatgtaactaaccagcaacaggtagaactaaataatagtacattgcaaacaatgacaggtaacttgtcagcacctaatttcttctctaggaacccagcatcagacccggcccatgtgcctcgttttgaccaaatcgttcttaaagactccgtacaagattttggatattattaagaggcattatggctactttaaaacaaatacaatttaaaagaagtaaggttgccggcgttcgtccggcgccaacagttcttgctgaaggtgaactggctatcaacctgaaagaccgcttactttttactaaagatgacaccggcgccattatcgaccttggttttgccaaaggcggtaatattgatggtaatgttattcataacggtaattacaatcaaactggtgattataccctgaatggtacttttacccaaactggtgattttaatttaaccggcattgctcgtgtaactcgcgatattattgccgcgggtcagataatgactgaaggtggtgaacttatttctaagagtgcatcgacttcgcatcttcgtttttttgatggtgcatcacgcgaacgcggtattatcttttctcctaacaatgcgggtttgacaactcaggtagttaatatacgagtgcaagattatgccgctggtagcgaaagcacttacgcgttttcaggcaatggtcaatttacttcacctgaagtatcagcatggaaatctatttcatccccacaaattctgactgataaagttattacaaatggtaagaaagctggtgattatgatatctattcattagcaaataataattctaacacagataaaaataatttacgtgttgtgcgtactgatgcagccgccgcaatgctccatgaaatttgtgaaaataacggtatcagttggtattctggttcaacccctactgattatatgttatcttttgcttattcaggtggttttcaagctggacattcgattgcagtgggtatggaatcagggcctatgacatattcagccttaggtaagggttctattgctcttggtgataatgacaccgggttaaaatggtaccaagatggttatttctatgcagtaaacaatggtacgagaactttcctttacagccctgaatcaactgtaagccttagaaaaatggtcatgggttattctgtaaacggtaacgatttaactacgccgccgacagaaaactatgcgcttggtaccgttgttacttatcatgataataatgccttcggtgatggacaaactcttttaggatattatcaaggtggagcatatcaccactattttcgtggtaaaggcactacaaacattaacaccacgggtggtttgttggttactccgggtaatatcgatgtgattggcggtttaattaatatcgacggccgcagtaatgcttcaaccttactgtttagtagctatacgtctggtcaaagctctgtcgataatatgaatatacgcgtttggggcgatacttttaccactgtagacggtactcgcaaaaacgtaatggaaatatctgatgctactagctggatgcaatatattcaacgaacaactgctggtaaagtcgaatcggttctaaatggctcccagattgttaatgaaaacctgaccgtagtaaaaaatgctacatttgatggtacaatcagcgcacatggtgaaattgcaggtaatgctgttaatgcccttagaatttggaacgacgattacggtgctattttccgtcgctcagaaggaagtcttcatattattcctacagcgtttggtgaaggacagggcggtgatatcggtccacttcgcccatttagtatggctttagatactggtaaagttactattccagatttacaatcaagttacaatacgttcgcagcaaacggctatattaaatttgttggtcatggggctggtgcaggcggttacgatattcaatatgcacaagcagctcctattttccaagaaattgatgatgccgcagtaagtaaatattatcctattgttaagcagaaattcttacaaggaaaagctgtttggtctttaggtactgaaattaattccgggacttttgttttacaccatcttaaagaagacgggaccgaaggacatacctcaagatttaatgccgatggtacagttaacttccccgataacgtgcaggttggtggtggtgaagctactattgcccgaaatggtaatatctggtccgatatttggaaaacgtttacttcagcaggcgatgtaactaatattcgcgatgccattgctactcgtgttgctaaagaaggcgatacaatgacaggcaagctgacaatagaagcccctggtgatgctttagtattaagaacaactacaggtaatagttcacatatccgttctgatgtaaatggtaccggcaactggtatgtcggtaaaggtggcagcgataatggaataggcctttacagctatgctactaactgtggcctgtatatcaccaataacggtgaattcaacgtagacctttctggtgctggtctggcaatgcaaatgaattattatcgcatgtatgttaacggtcgagcatgggttaatactcaaggtcatggttacggaaaccaatggcaaacagaagctccttatttcgttgactttggtgaatccgttcctaaagatagttatatgccaattatcaaaggaaaaagcactctagctactgaaggatattctactaaagcagacttcggtattattcgattaggtggagcggctacctggggttctgctgttattcgtgtgggttctgctgaaagcggcgatgcaagccatcctaatgcgatatacgtttttggcgccgacggcaccttaaccgcccctaatgctttgaatgctgcgtctcgaatgggcattggtacatcatgttcattaccaaatgcttctattgctattggcgataacgatacaggtcttgctactagaggtgatggtagtctaggcgcgtatgctaatgcgcagagtgtatttttctgggaagctggcggtattacgaccgagcaaaataagtttctaaacgttaacgccggtatgtatgttcgtgacaacatcgatgttaacgacgtttatatccgttctgatattcgctgtaagtcagaaattaagcttatagaaaatgcccaagagaaatctaaactcttaggcggttatacttatctgcttaaaaactctgtcacagatgaagttaaaccgtctgctggtttaattgctcaggaagttcaagaagtattgcctgaacttgtgactgaagataaagagaccggcttacttcgtttaaactataacggtattatcggtttaaatactgctactatcaacgagcatactgacgaaatcaaggaattgaaatctgaaattgctgagttgaaagcattaattaaatcattattataagaaagggccttcgggccctggaggtttttatggcagtagtaggaattcctggttggattggaacatcagcagtggctgaaacaggccagcgatggatgtctgcagcggctggacagttaagattgggactaccggtatcaatgtcgcaatttgctggtcggtcccgtgagattattcacacacttggtgcggaccacaactttaacgggcaatggtttagagaccgttgctttgaagccggcggtgctcctatagtgtttaatatcacaggcaacttagtatcatatactaaagatgttccgttgttctttatgtacggtgatacccctaacgaatatgttactttgaatattcatggtggtgttcatatgtggggccgaggtggcaacggtacagtaaatggaagcccgggcactaatggtggtgacgtaatccaaaatgatattggtggacgacttcgcatttggaattatggtgtgatagcctccggtggtggtggcggcggtgccgcatcattacagaatagttggcctgcaaatgctacagcaggtggcggtggcggcagaccatttggtctcggcggcggtggtgttaattggccaggcggcaatgctagttatgatggtccaggtggcggtggtaatgcaagccaatttggcggtggcaatggcggtgatgctggaggcgctggtggcgctggatggggtaataacttatccaggtcgggtggtggtgctcctggtagagcagtattcggttcctccccatcatggggcgcgacaggcactatctacggctcatggttatagtacataagcgctataaatatctttaaaggagaaaagtatggaaccaaaagtaggaatatcaatacccgacctactttttggacttcttgatagaatttttaaagataatgcgaccgggaaagttgttttttcccgggtactagttattgttctattatttttaatggcggtaatctggtataaaggtgatgcacttttagatgcgtacagggatgcttcatatgcctcatacactgaaatgataaggcaagaccaggataacagatttaaaattgcagctatcgagcaaatccagatagtccactcgtcaagtggggcagactttacagcaatatattcttttaggccaactaaccttaactactttgtggatatggtgggttacgaggggatattgcctgatacagtcgacgaaaaaaatttaggtgggtttccaatagataagacttcagcggaatatttggcgggggttaatggtaattattttgaatccagtgtggaatctgtattcttaccaacaaagaaaaaaagcagcttcacatatatgttcagctgcccattctttaatttggaaaacgtttatgcaggcacagtctcactgtactggtataagcaaaaacccgaccttggttttgataggctttcttctatgtgtggacaagcaggtcgtacgctcgggcgtacacgttagaatccggaggtatacatcataagataacggtgtatatcttcgaatccttcgttaaattgttcaatgatttgttcaatttcatcttcagataaacttttaaacaatttgttaaacgatacattgtttaactcattcccattctcatttctcaatcccaactcattcaaaaacgcgataaacacatcgcgcttcatcgtaatatcttcccggtcggttttaatcaaaattgaagttatagtaacaatttcagaaacgatttcaaatttagtcattttaatttactcaagtattcaataagacattcaattattcagtaagggtattatactattattcctctgggttgtacacatgattttccatctgtacaacatattcctgatacatctgttcaactggttcctggaacttaaaatcagctccaaggaattcctcaaagcaagcctgctcgtgcgtacgttgaccggtgatggtgttctctaagttatgactcataatgattccctttgtgcttctgcttacgtttggactgcattttggttttcttcttgtccttatggacagacgccttattgaaatcgtgcttagctaccagattgttcatgcaatttccttaattgatattcaagagaactgataatttctttattagttgcaatatacatatcacgtaggaagggtttcagaccttctctaactctatacgtgttatcactaatatcctttatatattcatggtctaaagcatcccaagccggctggttaacataagttccccagttgtcttccatcatagtgttcagacgtttgatatgattgatatgggtttcgattgcatcaatctggagttgtttaaggttcattaataaaggtcctctgaataaagttctttttcactaccgccacgttcaatacgcacttgatttgcataagtcgcaataatcattgcttcttcgcgggtccagtaattgctgtactggtcaatgaatccttgattatcaccacaaacatggtctgacacaagtttatcacttacttggtcaagcacttctgccatatccttggaataatgtctggcaccaggaataaccagagtcccaccatcttttaacttaaatcggttggcggcacatacaatccgtcgctgatatttttcattgttattccaatgcgcaatctgccaacagatttctgggacttcttccagaatatctttttcatcgcatgtgtatccatgtgctttaaatttttcagcgaggcttttgggggtttcacgcgattctggtgctggtaacatttctaaacgagtgataaacggattcatttcacaattaccttcttcattatattcggtgtaatcaccgtatgcatgtaatttagcagcgagactttcaggagtctcccgagaaagagctttatctaacaaggccatacggtctttaaaggataatgctttaccttttaatggattcatttgaaaatcaccttataaccgttatctttagcgaattcttgaattttagcggcggtttcaattaaatcacctttataataggatgataatttaatatcaactgttttgccttcgccatacgaagttatattcactttttccgtaaaaataagctcaagaaatcgcaatagctgcataccaaattcaagagtaacattatcaatctggaggttaagttgataagttttcttaataccattcaccagcgcacagcgctcatcccaagcgttacgttgttcttcaatcaatttaagggaatgaccttcgccatcccaatttagttccataggaatcatttgaaccaacctttaacacgttgccacagacttttctgttgagctttattaacaccaattgagcgaataactggttgtgattccaggtattctttatagtcagctttatagacttcatatgctgctggaacaaaggcaccaatcgccgccatgaagttcttgcgagcaccaaatggagctactgcatcatcctggcgatggataagatactgaccagctttgaccttgacaatagtcccaaggtaagcgccatgataccaaacatcccaaccctcttgagtaggttctacgcaagcacgcaattcattaacaatattcagcttattcataatttcctcactttaagatgttaataacatgttgaatgttttcagttgacatatgattgtcaatgtaggtattcaatccacctactttaacgctaaatcccacgtctgtaaactgttttactatcttttgttcagtattatacgcatgcacacgaatctgaccatcacgacgtacatcaatctgttttaatgtcttgatacgcttgaacttcacaatcagattgctgcggtcttctgaaatgctcttaaagtcaataccaatagacaataattgctctttgatatattctgcagtcgcttccatttcatcagtcacaccgcgttttgttcttgtcttcttcacttccagaaggtcaggattattttcattcgcccacagttcagctgcatccagaataaggtcaacacctttttctgtaaccatcaaaccatcaccagaagcttcaacatagttgttattcaacaatgtctgcacgctatcaattgacgtgttctgctggcctaaaacaacctcaggacgcacgaagttgtttttatatacaaacaccagagcattaacatcagtctcatgtagagcgttctgggagcatttaacgatataatttagcttgttcataattatcccttaatagatttcatgtaatttgatgcatatgattgtaccacagtacgtttcatatgggaagtagaaacaataacatcaatcgcttgtttacgttcttctttagaattcgccagtttgaacatgtcaaagtaataatagcaagcttctttattagatttgaatttagcgttaatgtattcttgaccttcattctgttgtgcagtaaacattttattctccaaagtttttgtgattcattgtgtaactcagtatggaatcattatgcatcaggtcaagggtcatgtacactacttttttaaatattttaaaataaaaaaggaccccgaagggtcctagtctttatctatcttattgccaataaacataccaacaatcacacctgcgattgccgcaaaaatacaaagcaatgcaaactcaactccaaaactcatagagcctccaaatcattaaggtattcagttttaacatcagttgtcttccagtactcatgctcagctttcttagcctttgcttcgtctgcaagcttcttggcttcatcagaggtcatatggtagatgttcatcgccactaacttctctgcataatcgccatatatttcactcgcctggagttcctcaatcaacttcttacgaggtttcccctggataacaaccttaccatcaatcacttctttaataaagaagacttttgcccgggccagtttaaacgcggcttcagtttctttaatcttactgtcaattcgcacttgaacataagtcttacggacatccacgaaatcgcgaatcaggtcaagcgtgttggtgtattcagccagtttgcctttatgattaagcactgttaagttctgggagagcttctcaatcagaccaaagtctttcatgattttctcatgattttcttcttcggtgccatccaacttgtattctttacggaatttaatcttaaacccaaaaccatgttcgccgcagttatctttccaggtgataaaacctttctcttccagcgggtccaggattttacttgtgtacttttccaggttccattggaccgggatttcagtaatttccatttgggtcctggacgtcattttgtatgtgccatgaagctcatacttaccaggctcttccagctcaacaactttaccacggaattctggatattttactttcggagcaaccggttcacgaccttccacgatagctttaacagcttccttaacgtcctggaacgaatgaggaaggatatcagtagcaaagccaacagcaatcccagaagtggcgttaagtaatacagtaggaataacaggaagataaaaagcaggaggcttatgttcttcatcaggatggaccggagcatattctgtatccttaaacaagttgtaaaagttctttgaaacccttgcgaatacataacgagccgatgatgcttctggcaccattctggaaccaaagttaccttgcccatcaaacataggatattcatttttatatgttgcaaccagaccagaagttgcttcttccgctgatgcttcaccatggtgataaccataatcagctacgccacctgcgatggatgcaaccttatggaatttattcttatcaccacgtgccaggtctaatgctctcgccataacaaatctgtgaactggtttaaaaccatcaatcatgtttgggatggcacgaccttccacagtgtagatagcatatgacaatgcttccacatcaataatgtcttttagactgcgtgggttaagggtccccatagaatcactgaactgtttggacatcatacttaaaacgtcagacatatatcaccttaccagattaacgaatgtactgccattatagcatcagaaataaaaagcacaacctgcactaacgcaaacacaactccgtaatacagcgccaccaataaggtagcaaggactaacgagtagcccaagattttcttaatcatttttatccaataatttaaatagtgataaaactgctaatacaccttgagctgttgactgcagaaatactgaagtttcaccagttattaatgttccaacaaataaaaatgaccagcagaaaaaagctacaccatgaacaaatttattcatattttcctcaaggacgtccgaagacgccggttaatttcagattatgacgatgccattgcatcacatgttcgttatggaaattactcatatataccacacattttgcataagcgttcaaaacagatatacccaccactaaagcacatagtaacagcaactttatcattaaatggagcaccaaaggctataaaggctcctgtaataacaaatagggctaaaacaaataggtaacccattgtaaagaaatgtctcatattaatagctctgcagaatgaatttaaagttatcagcaagcatgcgattcatttctgaaagggtctggcaatcagaactatgtgagcgagtgaacgccatcgcaatttgacctttaccataaccagttgtcagaggtttcattttagaaactgggacaaacaggacttcatagataaccccattgttcgccattgtgcgagacagttgagaacgctgtttgcggatgtgacttaatacagtgtcaaacccttgttgtgaacgttggttaccaacataaaaacgtgcagcaacaatacgtgattcgccttcacctttaaccacgaaataaaaacctggttgagtgatagcttctttagttgggcgaccggcaacataattaccattatggatataagcaacagtggtagcaccagcattcagtacgtcacgacgggtcatgtaagtagacatattaatttcctcagtaagttaaagttttgtgctccagtggggtcattatactctgaccccaagagtttgtacactatttttgtagttgttctaaaataaatccactggtgtaaaggcttgcattatacagacggtcaagagacaacgaatccaacccataagcttcacgaattgcattcacaacactttcataacttgtataataaacatcgcgataatcgcggtccatagtcatgcggaacttaataaatttatagaaaccagtttcagggtcctgatagaatgcaaattcagcagacatcaaatttttaaggttaacagcttttgtgccacctgaataacttaaatcaaatgcttctgatatgctaatttgtttaaagaacataatgttgcgattaccaaaaaatactttagacataatattttcctcaattaaattttattatccacgggaacattatactctgctcccaagagtttgtacactattctacatcaactgcgtcatcccacaagtcaacttcttctgatgattccatcagttcatcaactgtgaagcactcagtattattttcaattgcaaaacgtttctgataaaaaggataatccaaacagttttcagtgcgcacaggacgctcgctgttatccattaaaggtgaaatgcgaatcagttgttgaccattacccaggacaaatttttcaccaactgcaatgtctttaaaaagtttcattgcttagctccattccaaattacatcaacaacagacttcaaaccattatcctggatttgtgtgaacacttcagcagcaatccagagctggaaaccaatcattgcaatggcaccaatgaaaatcaggataatcatcgccacaataaacttgaacataaaatcaaagcgacgattggatttctgaaattgtgaattgtaattcataatattatcctcaaaagaaatagttaaagtaaacacgcacatggtcaatcataaaaacaattgggaaaatgctcaggacaacaaacagtacaaacatgttccaaatggctttaagtaactttttcataatcatctccagtagttgataggttcattatactacaaccactggagatgtacactcttttatgcaagtttcattaataataaactaaaacaaacgcaaattactgggatacacagcatccagataaggcaccaggttttgctgctcaaaatatcacctctttgatttcaatcaatcctctgtacaatgcagtgcgaaggtcataaagaatatctataccatcaacattatccagcttgccatcaataagcttttttaaatcttcctttgatgcaatcaatggacgaagaaatttacaatcagaaagagacaattctgtggtaacatcatcaccatcacctgatgcatcatacatagcagcaacaaccatacctgtaactttgtgtttggcgtagtataatttaatatccattttattttcctcatgcataacgattgtatgtatttttgcgacatgcgtaaaattgacgctcagtaactgcaaaactttttccacgctgatgcattaatttaaaaaattcagtaatatcgccattaacttcaaggtataaagtcattgcatattgagcaggtttcattttattctccagtatttggtaactcagtatggaatcattatacatagacgccatactgatgtacactactttttaattaattgtgcatttgttctttaacttctttatatgcgccaactgcattcacgaccccagtaaaatctgcagtcccacgatagagatagaaagcgatttcagtcaggtggtagacttcaaattctgaaagataaatgataacgtcataataggcaacttgtccctggacttcgttgaatactacatcaaaaatttcatgggttggaaaattgatgttgttgtttttgagtgcttgaataagaatttgtttgatgttattagtagtaacgtgttccatgataatgtcctcatttgttggtgtgaggacattattacatggttggttcagcttgtaaaccggtgatagggaaatttttcttctgaacaagaacggaggtaccagccatccccttgtgacttctgcacaagaccagactcaggaacgaaagcgccaggtccagcaaggaattttggtttaaatctataacctttgatagtctcttttacattaaacataatcataaggtcagcaagcttgtgctgcataaaaggaccaagattgaccccgtaaccatgcggataatcaccatggctgccagtgtgcacggatatccatttggagccagactgatgagttttgacttcgattcttaccccttctttcgaaactacatcaaatgcaaaggaataaggattatcgtaatcttcatcgccaccacataaaaaaccggaggtccatttagcaatagcttgttcagccattgtagccaccatacatctttgcatgacttgctcacggtcctggccagggtctttacgcaatgaatacctggcagtgtctacaatcttttgcagggattcgggggttaagtcttcttttgtataaagaaaggagggcatctttttcagatgctcccatgttttactcttctgaatcataatgtcatcctttaaaatacatatcggatttttcgacaatatctaaagaattttgctcagcttgctcttgataatcgctgccaatataaactttgtccacatgaacgacgccataataaattctggcactttcggctagtgtagaatggtccagactacgaagttcttctttcgttgcaagaatgatgtccctcgcatataaccgcccagttgactttgtagaagcataatgacaatccacacaataaacaatatccgcaacatgattaccatgcaaccggatttcgttaatagattcatcgccaacgttcatatagttaatcataatttattcaccaaaataagagatacggattgccagtacatgagcatatgcacccatcgcatccagttgggcaatcaaaagaccttgttgacggatatcgagagtttcaaaaactccacccttaataaattcttcaagagcattgattttcaaaaccagctggtcatgttcttcaactacacgtgcttggaaacctaacataaagcctcattaggggccgaagccccgattaatttagaattgttcagttacatcatcaaggaccaggtaaccacaaaccctcatttttgaatcattataatccaccgggatacttacaacatcgcgtgggtgaactttacaggatacgatgcgcccattaccatgaccaaagccacttccgatataacctttagagcaaacatgtaacccggttgaacaggtctgttcgtcattgtcattcacacgagagcgtggcattttaacatattggccagggctgttgtcgaatgtatttgagtgacaatctttgtatgttgcacgaaccattttccatgcgatgaaatgaccgtcttcggtgatttcgatatcgttagcaaccaggaagtcaaacaaacgctgtactgctttttcactcgggttctcaaggagattctcaaggaatggcagatagaattcaaagtcttcaccattttgcattgaatcaatgatacgagtaaccaggccggagcgcagttcaattccctgatagaacagactaccaccttcaatacgcacatcacctttcacatatttttgcaccgcagctttgattgagataaactcgatagcatcgtcaaaacgagattctttgagtgcctgaataatatcattaaagtgtttatggtcttttgttgcgttccagaccgtgcgaccttcggtgatggaaacgaatttgcttgatgcgttccatacgatttccgggcggctaccgccgattgtatcagcaaccgggacttcaaccgttactgtcaccggagcattaatcgccacaccaacagctgctttcagtgatgcagaaatggttttagctaattttgattctttatcatttttcaaaacgcggcgaatggtgtcaacggacacagcaaaatattctgccaattcaggctgggtataattgcccgttgaatacatctggaccacatcagcttgttcggctttagacatacatttgatattaaacatt

What is claimed is:

1. An isolated bacteriophage ECML-1 deposited under ATCC Deposit Accession No. PTA-127245, ECML-10 deposited under ATCC Deposit Accession No. PTA-127246, ECML-123-2 deposited under ATCC Deposit Accession No. PTA-121408, ECML-183-2 deposited under ATCC Deposit Accession No. PTA-127247, ECML-359 deposited under ATCC Deposit Accession No. PTA-121406, ECML-363 deposited under ATCC Deposit Accession No. PTA-121407, ECML-606-1 deposited under ATCC Deposit Accession No. PTA-127248, ECCR-664-1 deposited under ATCC Deposit Accession No. PTA-127249, or a combination thereof, said bacteriophages having lytic activity against pathogenic E. coli species strains.

2. A method for the reduction of food contamination and/or the incidence of food borne illnesses caused by pathogenic E. coli strains comprising contacting a food product or products with a microbial growth inhibiting effective amount of a bacteriophage composition comprising at least one of the isolated bacteriophage of claim 1 and variants thereof, wherein said variants have an average nucleotide identity over genome of ≥80% relative to the bacteriophage and retain the phenotypic characteristics of said bacteriophage, and wherein said bacteriophage and variants thereof have lytic activity against pathogenic E. coli strains.

3. The method according to claim 2, wherein the contact comprises spraying or misting or fogging the bacteriophage composition on the food product(s), by dipping or soaking or vacuum sealing the food product(s) in a solution containing a concentration of the bacteriophage composition sufficiently high to inhibit the growth of pathogenic E. coli strains, or adding, injecting or inserting the bacteriophage composition in said concentration into the food product(s).

4. A method for the reduction of food contamination and/or the incidence of food borne illnesses caused by pathogenic E. coli comprising contacting food processing equipment with a microbial growth inhibiting effective amount of a bacteriophage composition comprising at least one of the isolated bacteriophage of claim 1, and variants thereof, wherein said variants have an average nucleotide identity over genome of ≥80% relative to the bacteriophage and retain the phenotypic characteristics of said bacteriophage, and wherein said bacteriophage and variants thereof have lytic activity against pathogenic E. coli strains.

5. The method according to claim 4, wherein the contact comprises spraying or misting the bacteriophage composition on the food processing equipment, by dipping or soaking the food processing equipment in a solution containing a concentration of the bacteriophage composition sufficiently high to inhibit the growth of pathogenic E. coli strains, or adding, injecting or inserting the bacteriophage composition into the food processing equipment; or spraying or misting the bacteriophage composition on a surface used in food processing.

6. A method for the reduction of environmental contamination and/or the incidence of nosocomial infections caused by pathogenic E. coli comprising contacting porous and non-porous surfaces (including but not limited to floors, walls, beds, handheld remotes and other electronic equipment, and medical devises) in intensive care units, hospitals, urgent care centers, nursing homes, and other health care facilities with a microbial growth inhibiting effective amount of a bacteriophage composition comprising at least one of the isolated bacteriophage of claim 1 and variants thereof, wherein said variants have an average nucleotide identity over genome of ≥80% relative to the bacteriophage and retain the phenotypic characteristics of said bacteriophage, and wherein said bacteriophage and variants thereof have lytic activity against pathogenic E. coli strains.

7. A dietary supplement/feed additive/nutraceutical/pharmaceutical (drug) composition comprising one or more of an isolated bacteriophage of claim 1 and variants thereof, wherein said variants have an average nucleotide identity over genome of ≥80% relative to the bacteriophage and retain the phenotypic characteristics of said bacteriophage, and wherein said bacteriophage and variants thereof have lytic activity against pathogenic E. coli strains.

8. The dietary supplement/feed additive/nutraceutical/pharmaceutical (drug) composition according to any one of claim 7, wherein the composition is formulated as a capsule, gel capsule, enteric coated capsule, microgel, suppository, tablet, chewable composition, syrup, or gel.

9. The dietary supplement/feed additive/nutraceutical/pharmaceutical (drug) composition according to claim 7, wherein the composition further comprises a probiotic bacteria, preferably Lactobacillus species, preferably L. acidophilus, L. rhamnosus, L. gasseri, L. reuteri, L. bulgaricus, L. plantarum, L. johnsonii, L. paracasei, L. casei, L. salivarius, or L. lactis, Bifidobacterium species, preferably B. bifidum, B. longum, B. breve, B. infantis, B. lactis, or B. adolescentis, Streptococcus thermophilus, Bacillus cerus, Bacillus subtilis, Enterococcus faecalis, Enterococcus faecium, or a combination thereof.

10. The dietary supplement/feed additive/nutraceutical/pharmaceutical (drug) composition according to claim 7, wherein the composition further comprises a probiotic yeast, preferably Saccharomyces cerevisiae, Saccharomyces boulardii, Saccharomyces cerevisiae var. boulardii, Issatchenkia occidentalis, Lachancea thermotolerans, Metschnikowia ziziphicola, Torulaspora delbrueckii, or a combination thereof.

11. A method of reducing the risk thereof or mitigating infections caused by pathogenic E. coli comprising administering an effective amount of the dietary supplement/feed additive/nutraceutical/pharmaceutical (drug) composition according to claim 7.

12. A method of treating pathogenic E. coli-associated ailments in humans, such as kidney failure/hemolytic uremic syndrome, diarrhea (including hemorrhagic or very bloody diarrhea), thrombotic thrombocytopenic purpura (loss of blood platelets and kidney failure), comprising administering an effective amount of the dietary supplement/feed additive/nutraceutical/pharmaceutical (drug) composition according to claim 7.

13. A method of treating pathogenic E. coli-associated ailments in animals, such as bovine mastitis, pig colibacillosis, avian colibacillosis (including, but not limited to, aerosacculitis, perihepatitis, polyserositis, pericarditis, egg peritonitis, salphingitis, coligranuloma, omphalitis, cellulitis, and osteomyelitis/arthritis, septicemia and other diseases in chickens, turkeys, ducks, and other avian species), comprising administering an effective amount of the dietary supplement/feed additive/nutraceutical/pharmaceutical (drug) composition according to claim 7.

14. A method of increasing gut resilience against colonization with pathogenic E. coli bacteria in animals (including humans) comprising administering an effective amount of the dietary supplement/feed additive/nutraceutical/pharmaceutical (drug) composition according to claim 7.

15. A method of relieving gut discomfort including but not limited to diarrhea, cramps, fever and pain in animals (including humans) by reducing, or eliminating colonization with pathogenic E. coli bacteria comprising administering an effective amount of the dietary supplement/feed additive/nutraceutical/pharmaceutical (drug) composition according to claim 7.

16. A method for modulating an animal's (including human's) microbiome by preventing or reducing colonization by pathogenic E. coli bacteria strains of a subject comprising administration of an effective amount of a composition comprising at least one of the isolated bacteriophage of claim 1 and variants thereof, wherein said variants have an average nucleotide identity over genome of ≥80% relative to the bacteriophage and retain the phenotypic characteristics of said bacteriophage, and wherein said bacteriophage and variants thereof have lytic activity against pathogenic E. coli strains.

17. The method according to claim 16, wherein the pathogenic E. coli strain is Shiga-toxin producing E. coli (STEC), enterohemorrhagic E. coli (EHEC), enteropathogenic E. coli (EPEC), enterotoxigenic E. coli (ETEC), enteroaggregative E. coli (EAEC), enteroinvasive E. coli (EIEC) diffusely adherent E. coli (DAEC), uropathogenic E. coli (UPEC), meningitis-associated E. coli (MNEC), avian pathogenic E. coli (APEC), sepsis-associated E. coli, (SAEC), mammary pathogenic E. coli, endometrial pathogenic E. coli, adherent invasive E. coli (AIEC), necrotoxigenic E. coli, or a combination thereof.

18. The method according to claim 16, wherein the bacteriophage is present in the composition in an amount of 10⁶ and 10¹¹ PFU.

19. A method for vaccinating a subject against pathogenic E. coli bacteria, the method comprising administering to the subject a composition comprising a bacterial lysate obtained by lysing the pathogenic E. coli strain with a bacteriophage or an isolated progeny thereof according to claim 1.

20. A method for detecting a pathogenic E. coli in a food or environmental or clinical sample, the method comprising treating the sample with a bacteriophage or an isolated progeny or derivative thereof according to claim 1, thereby specifically eliciting release of measurable bacterial products, and measuring the released bacterial product.
